(19) United States
(12) Patent Application Publication
(10) Pub. No.: US 2026/0053950 A1
(43) Pub. Date: Feb. 26, 2026

(54) EPIGENETIC MODULATION OF GENOMIC TARGETS TO CONTROL EXPRESSION OF PWS-ASSOCIATED GENES

(71) Applicant: Duke University, Durham, NC (US)

(72) Inventors: Charles A. Gersbach, Chapel Hill, NC (US); Dahlia Rohm, Durham, NC (US)

(21) Appl. No.: 19/104,624

(22) PCT Filed: Aug. 18, 2023
(86) PCT No.: PCT/US2023/072524

§ 371 Date: Feb. 18, 2025

Related U.S. Application Data
(60) Provisional application No. 63/399,121, filed on Aug. 18, 2022.
(60) Provisional application No. 63/418,910, filed on Oct. 24, 2022.

(51) Int. Cl. A61K 48/00; A61K 38/17; A61P 21/00; C12N 9/02; C12N 9/22; C12N 15/11; C12N 15/85

(52) U.S. Cl. CPC A61K 48/005; A61K 38/1709; A61P 21/00; C12N 9/0071; C12N 9/226; C12N 15/111; C12N 15/85; C07K 2319/71; C12N 2310/20; C12Y 114/11

(57) ABSTRACT

Disclosed herein are DNA targeting systems that target a regulatory element of a gene within the 15q11-13 locus. Further provided are DNA targeting systems including at least one gRNA and a Cas9 protein, as well as compositions comprising the same. The compositions may be used in methods for treating Prader-Willi Syndrome (PWS) in a subject. The method may include administering to a subject the DNA targeting system.

### CROSS-REFERENCE TO RELATED APPLICATIONS

[0001] This application claims priority to U.S. Provisional Patent Application No. 63/399,121, filed Aug. 18, 2022, and U.S. Provisional Patent Application No. 63/418,910, filed Oct. 24, 2022, each of which is incorporated herein by reference in its entirety.

### STATEMENT REGARDING FEDERALLY SPONSORED RESEARCH

[0002] This invention was made with government support under grants R01DA036865, U01AI146356, UM1HG013053, and RM1HG011123 awarded by the National Institutes of Health. The government has certain rights in the invention.

### SEQUENCE LISTING

[0003] This application includes a Sequence Listing which has been submitted electronically in XML format and is hereby incorporated by reference in its entirety. Said XML copy created on Aug. 18, 2023, is named “028193-9495-WO01 Sequence Listing.xmi” and is 1,629,585 bytes in size.

### FIELD

[0004] This disclosure relates to compositions and methods for the treatment of genetic and epigenetic disorders by modulating expression of genes in the region of the Prader-Willi Syndrome (PWS) imprinted locus and stable expression of a gene within the 15q11-13 PWS-associated locus.

### INTRODUCTION

[0005] Complex mechanisms of epigenetic regulation, such as imprinting and X-inactivation, are part of mammalian development, and dysregulation of these processes is the basis for several human disorders. Although the identity and dynamic control of the epigenetic markers involved in these processes have been investigated extensively, the mechanisms of heritable and allele-specific changes in gene expression at specific loci are still relatively poorly understood. Altering specific epigenetic modifications at particular imprinted loci could provide insight into the contributions of these marks to the stability of gene expression patterns. The advent of epigenome editing with DNA-targeting technologies such as CRISPR-Cas9 has revolutionized the ability to manipulate gene expression states in living cells and organisms. For example, nuclease-deactivated Cas9 (dCas9) fused to transcriptional regulators or epigenome modifiers can recruit transcription factors to promoters or enhancers, directly alter histone marks or DNA methylation, or sterically block transcription or transcription factor binding.

[0006] dCas9-based epigenome editing technologies can deposit chromatin modifications in a highly specific fashion. Recent success using CRISPR/Cas9 for targeted epigenome editing has enabled a more precise evaluation of the link between chromatin modification and gene expression. These technologies have also been applied for the unbiased identification of distal gene regulatory elements using pooled gRNA screens. Screens with dCas9-based epigenetic editors can elucidate the roles of particular epigenetic markers and define key regulatory elements that would otherwise be challenging to predict computationally. In addition to mapping the regulatory landscape in the human genome, these studies may identify potential drug targets for next-generation epigenetic therapies.

[0007] PWS is a neuroendocrine and neurobehavioral disorder linked to genetic aberrations at the 15q11-13 imprinted locus. PWS is characterized clinically by hyperphagia, early-onset obesity, and intellectual disability. While the exact genetic basis that causes PWS remains unclear, patient mutation profiles have implicated a small nucleolar RNA (snoRNA) gene cluster SNORD116 downstream of the SNURF-SNRPN open reading frame within 15q11-13 as a likely primary contributor to the disease etiology. Because 15q11-13 is an imprinted locus, PWS arises from mutations or large deletions on the paternal allele, while the corresponding maternal copy remains intact but epigenetically silenced. Consequently, activation of the maternal allele provides a therapeutic opportunity to restore expression of PWS-associated genes.

[0008] Activation of PWS-associated genes from the maternal allele has been realized through knockdown and broad inhibition of epigenetic modifying enzymes and transcription factors. While small molecule-based inhibition of epigenetic modifiers could serve as a viable therapeutic strategy for PWS, it also carries the added risk of off-target activity resulting from the global loss of an enzyme critical to gene regulation. Epigenetic modifying enzymes are often expressed across a diversity of cell types and can associate with thousands of genomic loci. It can be challenging to predict the consequences of generally inhibiting such an enzyme in vivo. A more targeted approach utilizing recently developed DNA-targeting platforms could achieve similar epigenetic modification at the intended locus with minimal off-target activity. Currently there is no cure for PWS and no effective treatment for its symptoms of hyperphagia and anxiety. There remains a need for improved and/or additional therapies for treating PWS.

### SUMMARY

[0009] In an aspect, the disclosure relates to method of stably activating a gene or gene product within the imprinted 15q11-13 locus in a subject having Prader Willi Syndrome (PWS) or Prader-Willi-like disorder. The method may include non-virally administering to the subject a DNA targeting system that targets a target region in the imprinted 15q11-13 locus, the DNA targeting system comprising: a Cas protein or a fusion protein, wherein the fusion protein comprises two heterologous polypeptide domains, wherein the first polypeptide domain comprises a DNA-binding protein and wherein the second polypeptide domain has an activity selected from transcription activation activity, transcription repression activity, transcription release factor activity, histone modification activity, nuclease activity, nucleic acid association activity, methylase activity, demethylase activity, acetylation activity, and deacetylation activity, wherein the Cas protein or fusion protein is targeted to the target region in the imprinted 15q11-13 locus. In some embodiments, at least one component of the DNA targeting system is transiently expressed in a cell from the subject or transiently delivered to a cell from the subject. In some embodiments, expression of a gene within the imprinted 15q11-13 locus is maintained in a cell from the subject for at least 10, at least 15, at least 20, at least 25, at least 26, at least 30, at least 35, at least 40, at least 45, at least 48, at least 50, or at least 55 days post-administration. In some embodiments, the DNA-binding protein comprises a Cas protein, a zinc finger protein, or a transcription activator-like effector (TALE) protein. In some embodiments, the DNA-binding protein comprises a Cas protein and the DNA targeting system further comprises one or more guide RNAs (gRNA) that binds to the target region in the imprinted 15q11-13 locus. In some embodiments, the Cas protein comprises a Cas9 protein. In some embodiments, the second polypeptide domain comprises VP64, VP16; GAL4; p65 subdomain (NFkB); KMT2 family transcriptional activators: hSET1A, hSET1B, MLL1 to 5, ASH1, and homologs (Trx, Trr, Ash1); KMT3 family: SYMD2, NSD1; KMT4 family: DOT1L and homologs; KDM1: LSDI/BHC110 and homologs (SpLsd1/Swml/Saf110, Su(var)3-3); KDM3 family: JHDM2a/b; KDM4 family: JMJD2A/JHDM3A, JMJD2B, JMJD2C/GASC1, JMJD2D, and homologs (Rph1); KDM6 family: UTX, JMJD3, VP64-p65-Rta (VPR); synergistic action mediator (SAM); p300; VP160; VP64-dCas9-BFP-VP64; KAT2 family: hGCN5, PCAF, and homologs (dGCN5/PCAF, Gcn5; KAT3 family: CBP, p300 and homologs (dCBP/NEJ); KAT4: TAF1 and homologs (dTAF1); KAT5: TIP60/PLIP, and homologs; KAT6: MOZ/MYST3, MORF/MYST4, and homologs (Mst2, Sas3, CG1894); KAT7: HBO1/MYST2, and homologs (CHM, Mst2); KAT8: HMOF/MYST1, and homologs (dMOF, CG1894, Sas2, Mst2); KAT13 family: SRC1, ACTR, P160, CLOCK, and homologs; AID/Apobed deaminase family: AID; TET dioxygenase family: TET1; DEMETER glycosylase family: DME, DML1, DML2, or ROS1. In some embodiments, the second polypeptide domain comprises KRAB, Mad mSIN3 interaction domain (SID); the ERF repressor domain (ERD); KMT1 family: SUV39H1, SUV39H2, G9A, ESET/SETBD1, and homologs (Cir4, Su(var)3-9); KMT5 family: Pr-SET7/8, SUV4-20H1, and homologs (PR-set7, Suv4-20, and Set9); KMT6: EZH2, KMT8: RIZ1, KDM4 family: JMJD2A/JHDM3A, JMJD2B, JMJ2D2C/GASC1, JMJD2D, and homologs (Rph1); KDM5 family JARID1A/RBP2, JARID1B/PLU-1, JARIDIC/SMCX, JARID1D/SMCY, and homologs (Lid, Jhn2, Jmj2); HDAC1, HDAC2, HDAC3, HDAC8, and its homologs (Rpd3, Hos1, Cir6); HDAC4, HDAC5, HDAC7, HDAC9, and its homologs (Hdal, Cir3); SIRT1, SIRT2, and its homologs (Sir2, Hst1, Hst2, Hst3, and Hst4); HDAC11, DNMT1, DNMT3a/3b, MET1, DRM3, and homologs, ZMET2, CMT1, CMT2, Laminin A. Laminin B, or CTCF. In some embodiments, the second polypeptide domain comprises Tet1c or Tetiv4. In some embodiments, the second polypeptide domain comprises the amino acid sequence of SEQ ID NO: 1139 or SEQ ID NO: 1166, or is encoded by a polynucleotide comprising the sequence of SEQ ID NO: 1138 or SEQ ID NO: 1167. In some embodiments, the fusion protein comprises VP64-dCas9-VP64, dCas9-KRAB, Tet1c-dCas9, or Tetiv4-dCas9. In some embodiments, the fusion protein comprises the amino acid sequence of SEQ ID NO: 1168 or SEQ ID NO: 1169, or is encoded by a polynucleotide comprising the sequence of SEQ ID NO: 1169 or SEQ ID NO: 1171. In some embodiments, the target region in the imprinted 15q11-13 PWS-associated locus is on the maternal copy. In some embodiments, the target region in the imprinted 15q11-13 PWS-associated locus is on the paternal copy. In some embodiments, the expression of a gene or gene product within the imprinted 15q11-13 locus is increased. In some embodiments, the gene within the imprinted 15q11-13 locus comprises SNRPN, MAGEL2, MKRN3, NDN, C150RF2, SNURF-SNRPN, SNHG14, SNORD107, SNORD64, SNORD109A, SNORD116, SNORD116@, SPA1, SPA2, 116HG, SNORD116-1 to 30, Sno-Inc RNA 1 to 5, IPW, SNORD115, SNORD115@, 115HG, SNORD115-1 to 48, SNORD109B, SNG14, or a snoRNA in the SNORD116 cluster, or a combination thereof. In some embodiments, the gene within the imprinted 15q11-13 locus comprises SNRPN, SNORD116, MAGEL2, SNORD115, SPA1, and/or SPA2. In some embodiments, the expression of MAGEL2 or its products is increased. In some embodiments, the expression of SNORD116 or its products is increased. In some embodiments, the expression of the SNRPN gene or its products is increased. In some embodiments, expression of the SNRPN gene is maintained in a cell from the subject for at least 10, at least 15, at least 20, at least 25, at least 26, at least 30, at least 35, at least 40, at least 45, at least 48, at least 50, or at least 55 days post-administration. In some embodiments, the gRNA is encoded by a polynucleotide comprising a sequence selected from SEQ ID NOs: 1148-1156 or binds to a polynucleotide comprising a sequence selected from SEQ ID NOs: 1148-1156 or comprises a sequence selected from SEQ ID NOs: 1157-1165. In some embodiments, the DNA targeting system comprises two or more gRNAs. In some embodiments, the subject is administered a vector comprising a polynucleotide encoding the DNA targeting system. In some embodiments, the vector is a plasmid or a synthetic vector. In some embodiments, the vector comprises RNA. In some embodiments, the vector comprises ribonucleoprotein (RNP). In some embodiments, the vector is a vector within a nanoparticle. In some embodiments, the nanoparticle is a lipid nanoparticle or a polymeric nanoparticle.

[0010] In a further aspect, the disclosure relates to DNA targeting system that targets the imprinted 15q11-13 locus. The DNA targeting system may include (a) a Cas9 fusion protein, wherein the fusion protein comprises two heterologous polypeptide domains, wherein the first polypeptide domain comprises a Cas protein and the second polypeptide domain comprises Tet1, Tet1c, or Tet1v4; and (b) one or more guide RNAs (gRNA) that bind to a target region in the imprinted 15q11-13 locus. In some embodiments, the DNA targeting system is for use in stably activating expression of a gene or gene product within the imprinted 15q11-13 locus in a subject having Prader Willi Syndrome (PWS) or Prader-Willi-like disorder.

[0011] Another aspect of the disclosure provides isolated polynucleotide sequence encoding a DNA targeting system as detailed herein.

[0012] Another aspect of the disclosure provides a vector comprising an isolated polynucleotide sequence as detailed herein.

[0013] Another aspect of the disclosure provides a nanoparticle. The nanoparticle may include a DNA targeting system as detailed herein, or an isolated polynucleotide sequence as detailed herein, or a vector as detailed herein, or a combination thereof. In some embodiments, the nanoparticle is a lipid nanoparticle or a polymeric nanoparticle.

[0014] Another aspect of the disclosure provides a pharmaceutical composition. The pharmaceutical composition may include a DNA targeting system as detailed herein, or an isolated polynucleotide sequence as detailed herein, or a vector as detailed herein, or a nanoparticle as detailed herein, or a combination thereof.

[0015] The disclosure provides for other aspects and embodiments that will be apparent in light of the following detailed description and accompanying figures.

### BRIEF DESCRIPTION OF THE DRAWINGS

[0016] FIGS. 1A-1H. High-throughput screens reveal regulatory elements of maternal and paternal SNRPN alleles. (FIG. 1A) Schematic of the PWS locus on chr15 with common PWS deletions and the PWS gRNA library. Each thin vertical line represents a single gRNA. Genes colored blue are maternally imprinted, those that are pink are paternally imprinted, and those that are grey are not imprinted. (FIG. 1B) Summary of the PWS gRNA library. (FIG. 1C) Schematic of experimental protocol for CRISPRa/CRISPRi screens. (FIG. 1D) CRISPR screen results (zoomed in, see FIG. 2C) displayed as −log₁₀(p_{adj}), where p_{adj} is the multiple-hypothesis-corrected p-value from DESeq2. Notable regions are highlighted in beige. (FIG. 1E) Summary of the PWS gRNA sub-library. (FIG. 1F) qPCR of SNRPN-GFP for validations of pools of individual gRNAs of the matSNRPN-2A-GFP CRISPRa VP64-dCas9-VP64 screen. (FIG. 1G) Plot of −log₁₀(p_{adj}) values of each gRNA in the VP64-dCas9-VP64 full library screen vs. Tetlc-dCas9 sublibrary screen, plotting only the gRNAs present in both screens. (Significant p_{adj}<0.05.) (FIG. 1H) qPCR of SNRPN-GFP for validations of individual gRNAs of the matSNRPN-2A-GFP CRISPRa Tet1c-dCas9 screen.

[0017] FIGS. 2A-2H. CRISPRa/i screens. (FIG. 2A) Schematic of derivation of maternally or paternally tagged SNRPN-2A-GFP iPSCs. (FIG. 2B) Flow cytometry validation of differential GFP fluorescence of maternally and paternally-tagged lines. (FIG. 2C) CRISPR screen results shown in FIG. 1D, view zoomed out to cover the entire span of the human PWS gRNA library. (FIG. 2D) CRISPRi dCas9-KRAB patSNRPN-2A-GFP screen results (shown in FIG. 1D), separated by strand on which the gRNA is located. (FIG. 2E) Plot of −log₁₀(p_{adj}) values of each gRNA in the VP64-dCas9-VP64 full library screen vs. dCas9-KRAB screen. (Significant p_{adj}<0.05.) (FIG. 2F) qPCR of SNRPN-GFP from individual gRNA validations of each of the gRNAs in the mat1 and mat2 pools shown in FIG. 1F. (FIG. 2G) qPCR of SNRPN-GFP in patSNRPN-2A-GFP dCas9-KRAB iPSCs with gRNAs from the pat4, mat1, and mat2 regions. (FIG. 2H) qPCR of SNRPN-GFP in matSNRPN-2A-GFP VP64-dCas9-VP64 iPSCs with gRNAs from the CRISPRi screen hits. For qPCR in (FIG. 2F), (FIG. 2G), and (FIG. 2H), fold change values are plotted mean+/−SD, but statistics were calculated on ddCt values (normalized to GAPDH and empty vector sample); one-way ANOVA followed by Dunnett's test vs. empty vector. **p<0.001, ***p<0.0001. Unmarked comparisons are not significant.

[0018] FIGS. 3A-3I. KRAB can activate paternal SNRPN expression. (FIG. 3A) Flow cytometry of SNRPN-GFP MFI for validations of individual gRNAs of the patSNRPN-2A-GFP CRISPRi dCas9-KRAB screen. MFI values normalized to Empty vector. One-way ANOVA followed by Dunnett's multiple comparisons test vs. Empty. *p<0.01, **p<0.001, ***p<0.0001. (FIG. 3B) CRISPRi screen results (shown in FIG. 1D), plotted as log₂(fold change) gRNA enrichment between low and high GFP sorted bins. (FIG. 3C) qPCR of SNRPN-GFP from total mRNA in patSNRPN-2A-GFP dCas9-KRAB lines. (FIG. 3D) qPCR of SNRPN-GFP from polyadenylated (poly-A) mRNA in patSNRPN-2A-GFP dCas9-KRAB lines. (FIG. 3E) qPCR of the indicated genes from total mRNA in patSNRPN-2A-GFP dCas9-KRAB lines. In (FIG. 3C), (FIG. 3D), and (FIG. 3E), qPCR results are plotted as fold change values mean+/−SD, but statistics were calculated on ddCt values (normalized to GAPDH and empty vector control); one-way ANOVA followed by Dunnett's test vs. ΔPWS NT gRNA *p<0.05, ***p<0.001, ****p<0.0001. (FIG. 3F) Schematic of 3′ RACE-seq of SNRPN transcript. (FIG. 3G, FIG. 3H) Comparison of SNRPN 3′ UTR sequence variants in control cells with dCas9-KRAB and an empty gRNA vector and cells treated with either (FIG. 3G) a pat6 gRNA or (FIG. 3H) a pat8 gRNA (FIG. 3I) Sequences of the four most predominant 3′ UTR variants detected in all conditions. Number labels in (FIG. 3G) and (FIG. 3H) match the corresponding numbered sequences in (FIG. 3I).

[0019] FIGS. 4A-4D. Dual gRNA screen with VP64-dCas9-VP64 reveals additional regulatory regions of SNRPN (FIG. 4A) Genome browser track depicting results from both the single and dual gRNA screens. (FIG. 4B) Comparison of the significant hits (p_{adj}<0.05) between the single and dual gRNA CRISPRa screens upstream of the SNRPN promoter. (FIG. 4C) Plot of −log₁₀(p_{adj}) values of each gRNA in the VP64-dCas9-VP64 full library screen vs. sublibrary screen. (Significant p_{adj}<0.05.) (FIG. 4D) Plot of −log₁₀(p_{adj}) values of each gRNA in the Tet1c-dCas9 sublibrary screen vs. dCas9-KRAB full library screen. (Significant pd, <0.05.)

[0020] FIGS. 5A-5G. Tet1c and VP64 activate maternally imprinted PWS genes in ΔPWS iPSCs. (FIG. 5A) Schematic of chr15 in isogenic wildtype (WT) and PW Type II deletion (ΔPWS) iPSCs. (FIG. 5B) qPCR of SNRPN in WT or ΔPWS iPSCs with VP64-dCas9-VP64 14 days after transduction with the indicated gRNA or gRNA pool. (FIG. 5C) qPCR of SNRPN in WT or ΔPWS iPSCs with Tet1c-dCas9 14 days after transduction with the indicated gRNA or gRNA pool. For both qPCR plots, fold change values are plotted mean+/−SD, but statistics were calculated on ddCt values (normalized to GAPDH and WT ctrl sample); one-way ANOVA followed by Dunnett's test vs. ΔPWS NT gRNA ****p<0.0001. (FIG. 5D) Differential expression analysis of total RNA sequencing of VP64-dCas9-VP64 ΔPWS iPSCs, comparing mat1 g3 to NT gRNA (FIG. 5E) Differential expression analysis of total RNA sequencing of Tetlc-dCas9 ΔPWS iPSCs, comparing IC g5 to NT gRNA. (FIG. 5F) HCR FlowFISH of VP64-dCas9-VP64 iPSCs (WT or ΔPWS) with the indicated gRNA. SNHG14 signal on X axis, with TBP as a control for cell size and staining. (FIG. 5G) HCR FlowFISH of Tet1c-dCas9 iPSCs (WT or ΔPWS) with the indicated gRNA. SNRPN (transcript variant 1) signal on X axis, with TBP as a control for cell size and staining.

[0021] FIGS. 6A-6G. PWS gene expression in VP64-dCas9-VP64 or Tet1c-dCas9 ΔPWS iPSCs. (FIG. GA, FIG. 6C): qPCR of WT or ΔPWS VP64-dCas9-VP64 iPSCs with NT or mat1 g3 gRNA for either (FIG. 6A) SNORD116 or (FIG. 6C) sets of SNRPN transcript variants. (FIG. 6B, FIG. 6D) qPCR of WT or ΔPWS Tet1c-dCas9 iPSCs with NT or IC g5 gRNA for either (FIG. 6B) SNORD116 or (FIG. 6D) sets of SNRPN transcript variants. Fold change values (relative to GAPDH) are plotted mean+/−SD, but statistics were calculated on dCt values (normalized to GAPDH): one-way ANOVA followed by Sidak's multiple comparisons test for select groups WT+targeting gRNA vs. NT gRNA or ΔPWS+targeting gRNA vs. NT gRNA. *p<0.05, ***p<0.001,***p<0.0001. (FIG. 6E, FIG. 6F) Two replicates of HCR FlowFISH (Rep. 1 of each was shown in FIG. 3F and FIG. 3G, respectively) of WT or ΔPWS iPSCs with either (FIG. 6E) VP64-dCas9-VP64 and NT or mat1/2 gRNAs, or (FIG. 6F) Tetlc-dCas9 and NT or IC gRNAs. (FIG. 6G) Browser tracks of ATAC sequencing (rpkm-normalized BigWig) of ΔPWS or WT iPSCs with VP64-dCas9-VP64 and NT or mat1 g3 gRNA at the PWAR1 gene.

[0022] FIGS. 7A-7D. Additional sequencing of VP64-dCas9-VP64 or Tet1c-dCas9 ΔPWS iPSC conditions. (FIG. 7A) Genome browser visualization of RNA sequencing (rpkm-normalized BigWig) of VP64-dCas9-VP64 WT or ΔPWS iPSCs with NT or mat1 g3 gRNA, zoomed in on SNRPN upstream exons. (FIG. 7B) Browser tracks of ATAC sequencing (rpkm-normalized BigWig) of ΔPWS or WT iPSCs with Tet1c-dCas9 and NT or IC g5 gRNA. (FIG. 7C) Quantification of ATAC-seq reads (counts per million) at each of the two peaks at the PWS-IC (mat3 g5 is located within the first of the two peaks, see S4B). ΔPWS+NT vs. mat3 gRNA not significant, Tukey's test following one-way ANOVA. (FIG. 7D) qPCR of SNRPN expression in ΔPWS iPSCs with NT or mat3 g5 gRNA, comparing 3 different Tet1c-dCas9 constructs, all delivered by lentivirus.

[0023] FIGS. 8A-8D. Tet1c and VP64 alter chromatin accessibility and/or DNA methylation at the PWS locus. (FIG. 8A) Targeted bisulphite sequencing of ΔPWS iPSCs with VP64-dCas9-VP64 covering 24 CpG sites within the PWS locus (hg19 chr15: 25200353-25200693) (FIG. 8B) Targeted bisulphite sequencing of ΔPWS iPSCs with Tet1c-dCas9 covering 24 CpG sites within the PWS locus (hg19 chr15: 25200353-25200693). Data for (FIG. 8A) and (FIG. 8B) are shown as the range of the data, with the plotted point being the median. (FIG. 8C) Browser tracks of ATAC sequencing (rpkm-normalized BigWig) of ΔPWS or WT iPSCs with VP64-dCas9-VP6′ and NT or mat1 g3 gRNA. (FIG. 8D) Quantification of ATAC-seq reads (counts per million) at the peak at the mat1 g3 guide binding site (dashed line in (FIG. 8A)). **p<0.001, Tukey's test following one-way ANOVA.

[0024] FIGS. 9A-9D. Transient expression of Tetiv4-dCas9 in ΔPWS iPSCs stably activates maternal PWS genes. (FIG. 9A) Schematic of experimental protocol for transient delivery of Tetiv4-dCas9 plasmid and PWS gene expression analysis. (FIG. 9B) qPCR of dCas9 or SNRPN in WT or ΔPWS iPSCs after transient delivery of Tetiv4-dCas9 on Day 0. (FIG. 9C) qPCR of PWS genes in iPSC-derived neurons. Data plotted as mean fold change+/−SD, but statistics computed on ddCt (normalized to GAPDH and WT+NT). Two-way ANOVA followed by Dunnett's test, compared to ΔPWS+NT gRNA: **p<0.01, ***p<0.001, ****p<0.0001. (FIG. 9D) Targeted bisulphite sequencing of ΔPWS iPSC-derived neurons approximately 21 days post-differentiation, covering 24 CpG sites within the PWS locus (hg19 chr15: 25200353-25200693). Data shown as median+/−range.

### DETAILED DESCRIPTION

[0025] As detailed herein, a CRISPR/dCas9-based screening approach was used to identify genomic regulatory elements at the 15q11-13 locus controlling expression of the SNURF-SNRPN host transcript in human induced pluripotent stem cells (iPSCs). Through independent screens against either the paternal or maternal allele, regulatory elements controlling expression of PWS-associated genes were identified. The successful activation of the maternal host transcript and other PWS genes, such as SNRPN and the transcript containing SNORD115 and SNORD116, was demonstrated using targeted epigenetic editing with different dCas9-based effectors, including both DNA methylation-dependent and DNA methylation-independent mechanisms. These discoveries provide a new avenue for targeted epigenetic therapy.

[0026] The present invention is directed to methods of treating Prader-Willi Syndrome (PWS), Prader-Willi-like syndrome, or disorders that would benefit from activation of the genes within the PWS locus, wherein activation of the genes within one allele of the 15q11-13 locus reintroduces lost functional gene expression. The compositions and methods detailed herein may stably activate a gene or gene product within the imprinted 15q11-13 locus. As further detailed herein, non-viral administration of the DNA targeting systems resulted in stable expression of genes within the 15q11-13 imprinted region, even though expression of the DNA targeting system was transient.

### 1. DEFINITIONS

[0027] Unless otherwise defined, all technical and scientific terms used herein have the same meaning as commonly understood by one of ordinary skill in the art. In case of conflict, the present document, including definitions, will control. Preferred methods and materials are described below, although methods and materials similar or equivalent to those described herein can be used in practice or testing of the present invention. All publications, patent applications, patents and other references mentioned herein are incorporated by reference in their entirety. The materials, methods, and examples disclosed herein are illustrative only and not intended to be limiting.

[0028] The terms “comprise(s),” “include(s),” “having,” “has,” “can,” “contain(s),” and variants thereof, as used herein, are intended to be open-ended transitional phrases, terms, or words that do not preclude the possibility of additional acts or structures. The singular forms “a,” “and,” and “the” include plural references unless the context clearly dictates otherwise. The present disclosure also contemplates other embodiments “comprising,” “consisting of,” and “consisting essentially of,” the embodiments or elements presented herein, whether explicitly set forth or not.

[0029] For the recitation of numeric ranges herein, each intervening number there between with the same degree of precision is explicitly contemplated. For example, for the range of 6-9, the numbers 7 and 8 are contemplated in addition to 6 and 9, and for the range 6.0-7.0, the number 6.0, 6.1, 6.2, 6.3, 6.4, 6.5, 6.6, 6.7, 6.8, 6.9, and 7.0 are explicitly contemplated.

[0030] The term “about” as used herein as applied to one or more values of interest, refers to a value that is similar to a stated reference value. In certain aspects, the term “about” refers to a range of values that fall within 20%, 19%, 18%, 17%, 16%, 15%, 14%, 13%, 12%, 11%, 10%, 9%, 8%, 7%, 6%, 5%, 4%, 3%, 2%, 1%, or less in either direction (greater than or less than) of the stated reference value unless otherwise stated or otherwise evident from the context (except where such number would exceed 100% of a possible value).

[0031] “Adeno-associated virus” or “AAV” as used interchangeably herein refers to a small virus belonging to the genus Dependovirus of the Parvoviridae family that infects humans and some other primate species, including variants thereof. AAV is not currently known to cause disease and consequently the virus causes a very mild immune response.

[0032] “Amino acid” as used herein refers to naturally occurring and non-natural synthetic amino acids, as well as amino acid analogs and amino acid mimetics that function in a manner similar to the naturally occurring amino acids. Naturally occurring amino acids are those encoded by the genetic code. Amino acids can be referred to herein by either their commonly known three-letter symbols or by the one-letter symbols recommended by the IUPAC-IUB Biochemical Nomenclature Commission. Amino acids include the side chain and polypeptide backbone portions.

[0033] “Binding region” as used herein refers to the region within a target region that is recognized and bound by the DNA binding portion of a DNA Targeting System including a Targeted Activator System or a Targeted Repressor System, such as a nuclease or DNA binding domain fused to an activator or repressor.

[0034] “Coding sequence” means a nucleotide sequence (RNA or DNA) which encodes a protein. The coding sequence can further include initiation and termination signals operably linked to regulatory elements including a promoter and polyadenylation signal capable of directing expression in the cells of an individual or mammal to which the nucleic acid is administered. The coding sequence may be codon optimized.

[0035] “Complement” or “complementary” as used herein with respect to a nucleic acid means Watson-Crick (such as, A-T/U and C-G) or Hoogsteen base pairing between nucleotides or nucleotide analogs of nucleic acids. “Complementarity” refers to a property shared between two nucleic acid sequences, such that when they are aligned antiparallel to each other, the nucleotide bases at each position will be complementary.

[0036] The terms “control,” “reference level,” and “reference” are used herein interchangeably. The reference level may be a predetermined value or range, which is employed as a benchmark against which to assess the measured result. “Control group” as used herein refers to a group of control subjects. The predetermined level may be a cutoff value from a control group. The predetermined level may be an average from a control group. Cutoff values (or predetermined cutoff values) may be determined by Adaptive Index Model (AIM) methodology. Cutoff values (or predetermined cutoff values) may be determined by a receiver operating curve (ROC) analysis from biological samples of the patient group. ROC analysis, as generally known in the biological arts, is a determination of the ability of a test to discriminate one condition from another, such as, to determine the performance of each marker in identifying a patient having CRC. A description of ROC analysis is provided in P. J. Heagerty et al. (Biometrics 2000, 56, 337-44), the disclosure of which is hereby incorporated by reference in its entirety. Alternatively, cutoff values may be determined by a quartile analysis of biological samples of a patient group. For example, a cutoff value may be determined by selecting a value that corresponds to any value in the 25th-75th percentile range, preferably a value that corresponds to the 25th percentile, the 50th percentile or the 75th percentile, and more preferably the 75th percentile. Such statistical analyses may be performed using any method known in the art and can be implemented through any number of commercially available software packages (such as, from Analyse-it Software Ltd., Leeds, UK; StataCorp LP, College Station, TX; SAS Institute Inc., Cary, NC.). The healthy or normal levels or ranges for a target or for a protein activity may be defined in accordance with standard practice. A control may be an subject or cell without an agonist as detailed herein. A control may be a subject, or a sample therefrom, whose disease state is known. The subject, or sample therefrom, may be healthy, diseased, diseased prior to treatment, diseased during treatment, or diseased after treatment, or a combination thereof.

[0037] “Donor DNA”, “donor template,” and “repair template” as used interchangeably herein refers to a double-stranded DNA fragment that includes at least a portion of the gene of interest.

[0038] “Frameshift” or “frameshift mutation” as used interchangeably herein refers to a type of gene mutation wherein the addition or deletion of one or more nucleotides causes a shift in the reading frame of the codons in the mRNA. The shift in reading frame may lead to the alteration in the amino acid sequence at protein translation, such as a missense mutation or a premature stop codon.

[0039] “Fusion protein” as used herein refers to a chimeric protein created through the covalent or non-covalent joining of two or more separate proteins. In some embodiments, translation of a fusion gene created through joining of two or more genes that originally coded for separate proteins results in a single polypeptide with functional properties derived from each of the original proteins.

[0040] “Genetic construct” as used herein refers to the DNA or RNA that comprise a polynucleotide that encodes a protein or RNA. The coding sequence includes initiation and termination signals operably linked to regulatory elements including a promoter and polyadenylation signal capable of directing expression in the cells of the individual to whom the nucleic acid is administered. As used herein, the term “expressible form” refers to gene constructs that contain the necessary regulatory elements operable linked to a coding sequence that encodes a protein or RNA such that when present in the cell of the individual, the coding sequence will be expressed.

[0041] “Homology-directed repair” or “HDR” as used interchangeably herein refers to a mechanism in cells to repair double strand DNA lesions when a homologous piece of DNA is present in the nucleus, mostly in G2 and S phase of the cell cycle. HDR uses a donor DNA template to guide repair and may be used to create specific sequence changes to the genome, including the targeted addition of whole genes. If a donor template is provided along with the CRISPR/Cas9-based gene editing system, then the cellular machinery will repair the break by homologous recombination, which is enhanced several orders of magnitude in the presence of DNA cleavage. When the homologous DNA piece is absent, non-homologous end joining may take place instead.

[0042] “Genome editing” as used herein refers to changing a gene. Genome editing may include correcting or restoring a mutant gene or adding additional mutations. Genome editing may include knocking out a gene, such as a mutant gene or a normal gene.

[0043] “Identical” or “identity” as used herein in the context of two or more nucleic acids or polypeptide sequences means that the sequences have a specified percentage of residues that are the same over a specified region. The percentage may be calculated by optimally aligning the two sequences, comparing the two sequences over the specified region, determining the number of positions at which the identical residue occurs in both sequences to yield the number of matched positions, dividing the number of matched positions by the total number of positions in the specified region, and multiplying the result by 100 to yield the percentage of sequence identity. In cases where the two sequences are of different lengths or the alignment produces one or more staggered ends and the specified region of comparison includes only a single sequence, the residues of single sequence are included in the denominator but not the numerator of the calculation. When comparing DNA and RNA, thymine (T) and uracil (U) may be considered equivalent. Identity may be performed manually or by using a computer sequence algorithm such as BLAST or BLAST 2.0. Identity of related peptides can be readily calculated by known methods. Such methods include, but are not limited to, those described in Computational Molecular Biology, Lesk, A. M., ed., Oxford University Press, New York, 1988; Biocomputing: Informatics and Genome Projects, Smith, D. W., ed., Academic Press, New York, 1993; Computer Analysis of Sequence Data, Part 1, Griffin, A. M., and Griffin, H. G., eds., Humana Press. New Jersey, 1994; Sequence Analysis in Molecular Biology, von Heinje, G., Academic Press, 1987; Sequence Analysis Primer, Gribskov, M. and Devereux, J., eds., M. Stockton Press, New York, 1991; and Carillo et al, SIAM J. Applied Math. 48, 1073 (1988), herein incorporated by reference in their entirety.

[0044] As used herein, the term “imprinting” refers to the differential expression of alleles of the same gene in a parent-of-origin-specific manner, or to the biological process by which such a pattern is established. An “imprinted gene” is a gene that is subject to imprinting. Mammalian somatic cells are normally diploid, i.e., they contain two homologous sets of autosomes (chromosomes that are not sex chromosomes)—one set inherited from each parent, and a pair of sex chromosomes. Thus, mammalian somatic cells normally contain two copies of each autosomal gene—a maternal copy and a paternal copy. The two copies (often referred to as “alleles”) may be identical or may differ at one or more nucleotide positions. For most genes, the alleles inherited from the mother and father exhibit similar expression levels. In contrast, imprinted genes are normally expressed in a parent-of-origin specific manner-either the maternal allele (the allele on the chromosome inherited from the mother) is expressed and the paternal allele (the allele present on the chromosome inherited from the father) is not, or the paternal allele is expressed and the maternal allele is not. The allele that is not expressed may be referred to as the “imprinted allele” or “imprinted copy”. Imprinted genes can occur in large, coordinately regulated clusters or small domains composed of only one or two genes. Imprinting has generally been found to be conserved between mice and humans, i.e., if a gene is imprinted in mice, the orthologous gene is typically imprinted in humans as well, and vice versa. Parental allele-specific expression of imprinted genes is generally due to an imprinting control region.

[0045] As used herein, an “imprinting center” is a DNA region that controls the imprinting of at least one gene (typically a cluster of genes). In other words, the imprinting center controls the mono-allelic expression of the at least one gene in a manner that depends on the parental origin of the alleles. An imprinting center must be on the same chromosome as the imprinted gene(s) whose expression it affects but can be located a considerable distance away (such as, up to several megabases away).

[0046] The term “imprinting disorder” refers to any disorder caused by alterations in the normal imprinting pattern, any disorder caused by changes in expression or gene dosage of an imprinted gene, and/or any disorder caused by the mutation or deletion of an imprinted gene. Non-limiting examples of imprinting disorders include Angelman syndrome. Prader-Willi syndrome.

[0047] “Mutant gene” or “mutated gene” as used interchangeably herein refers to a gene that has undergone a detectable mutation. A mutant gene has undergone a change, such as the loss, gain, or exchange of genetic material, which affects the normal transmission and expression of the gene. A “disrupted gene” may refer to a mutant gene that has a mutation that causes a premature stop codon. The disrupted gene product is truncated relative to a full-length undisrupted gene product.

[0048] “Non-homologous end joining (NHEJ) pathway” as used herein refers to a pathway that repairs double-strand breaks in DNA by directly ligating the break ends without the need for a homologous template. The template-independent re-ligation of DNA ends by NHEJ is a stochastic, error-prone repair process that introduces random micro-insertions and micro-deletions (indels) at the DNA breakpoint. This method may be used to intentionally disrupt, delete, or after the reading frame of targeted gene sequences. NHEJ typically uses short homologous DNA sequences called microhomologies to guide repair. These microhomologies are often present in single-stranded overhangs on the end of double-strand breaks. When the overhangs are perfectly compatible, NHEJ usually repairs the break accurately, yet imprecise repair leading to loss of nucleotides may also occur but is much more common when the overhangs are not compatible.

[0049] “Normal gene” as used herein refers to a gene that has not undergone a change, such as a loss, gain, or exchange of genetic material. The normal gene undergoes normal gene transmission and gene expression. For example, a normal gene may be a wild-type gene.

[0050] “Nuclease mediated NHEJ” as used herein refers to NHEJ that is initiated after a nuclease cuts double stranded DNA.

[0051] “Nucleic acid” or “oligonucleotide” or “polynucleotide” as used herein means at least two nucleotides covalently linked together. The depiction of a single strand also defines the sequence of the complementary strand. Thus, a polynucleotide also encompasses the complementary strand of a depicted single strand. Many variants of a polynucleotide may be used for the same purpose as a given polynucleotide. Polynucleotides may be single stranded or double stranded, or may contain portions of both double stranded and single stranded sequence. The polynucleotide can be nucleic acid, natural or synthetic, DNA, genomic DNA, cDNA, RNA, or a hybrid, where the polynucleotide can contain combinations of deoxyribo- and ribo-nucleotides, and combinations of bases including uracil, adenine, thymine, cytosine, guanine, inosine, xanthine hypoxanthine, isocytosine, and isoguanine. Polynucleotides can be obtained by chemical synthesis methods or by recombinant methods.

[0052] “Open reading frame” refers to a stretch of codons that begins with a start codon and ends at a stop codon. In eukaryotic genes with multiple exons, introns are removed, and exons are then joined together after transcription to yield the final mRNA for protein translation. An open reading frame may be a continuous stretch of codons. In some embodiments, the open reading frame only applies to spliced mRNAs, not genomic DNA, for expression of a protein.

[0053] “Operably linked” as used herein means that expression of a gene is under the functional control of a regulatory element, such as a promoter. For instance, a promoter or enhancer is operably linked to a coding sequence if it regulates, or contributes to the modulation of, the transcription of the coding sequence. A promoter may be positioned 5′ (upstream) or 3′ (downstream) of a gene under its control. As is known in the art, variation in the distance between the promoter and the gene it controls may be accommodated without loss of promoter function. Enhancers may function when separated from the promoter by up to several kilobases or more. Thus, regulatory elements may be operably linked without being contiguous.

[0054] “Partially-functional” as used herein describes a protein that is encoded by a mutant gene and has less biological activity than a functional protein but more than a non-functional protein.

[0055] A “peptide” or “polypeptide” is a linked sequence of two or more amino acids linked by peptide bonds. The polypeptide can be natural, synthetic, or a modification or combination of natural and synthetic. The terms “polypeptide”, “protein.” and “peptide” are used interchangeably herein. “Primary structure” refers to the amino acid sequence of a particular peptide. “Secondary structure” refers to locally ordered, three dimensional structures within a polypeptide. These structures are commonly known as domains, such as, enzymatic domains, extracellular domains, transmembrane domains, pore domains, and cytoplasmic tail domains. “Domains” are portions of a polypeptide that form a compact unit of the polypeptide and are typically 15 to 350 amino acids long. Exemplary domains include domains with enzymatic activity or ligand binding activity. Typical domains are made up of sections of lesser organization such as stretches of beta-sheet and alpha-helices. “Tertiary structure” refers to the complete three-dimensional structure of a polypeptide monomer. “Quaternary structure” refers to the three-dimensional structure formed by the noncovalent association of independent tertiary units. A “motif” is a portion of a polypeptide sequence and includes at least two amino acids. A motif may be 2 to 20, 2 to 15, or 2 to 10 amino acids in length. In some embodiments, a motif includes 3, 4, 5, 6, or 7 sequential amino acids. A domain may be comprised of a series of the same type of motif.

[0056] “Premature stop codon” or “out-of-frame stop codon” as used interchangeably herein refers to nonsense mutation in a sequence of DNA, which results in a stop codon at location not normally found in the wild-type gene. A premature stop codon may cause a protein to be truncated or shorter compared to the full-length version of the protein.

[0057] The term “recombinant” when used with reference to, for example, a cell, nucleic acid, protein, or vector, indicates that the cell, nucleic acid, protein, or vector, has been modified by the introduction of a heterologous nucleic acid or protein or the alteration of a native nucleic acid or protein, or that the cell is derived from a cell so modified. Thus, for example, recombinant cells express genes that are not found within the native (naturally occurring) form of the cell or express a second copy of a native gene that is otherwise normally or abnormally expressed, under expressed, or not expressed at all.

[0058] “Transcriptional regulatory elements” or “regulatory elements” refers to a genetic element which can control the expression of nucleic acid sequences, such as activate, enhancer, or decrease expression, or alter the spatial and/or temporal expression of a nucleic acid sequence. Examples of regulatory elements include promoters, enhancers, splicing signals, polyadenylation signals, and termination signals. “Promoter” as used herein means a synthetic or naturally-derived nucleotide sequence which is capable of conferring, activating or enhancing expression of a nucleic acid in a cell. A promoter may also comprise distal enhancer or repressor elements, which may be located as much as several thousand base pairs from the start site of transcription. A promoter or other regulatory element may be derived from sources including viral, bacterial, fungal, plants, insects, and animals. A promoter may regulate the expression of a gene component constitutively, or differentially with respect to cell, the tissue or organ in which expression occurs or, with respect to the developmental stage at which expression occurs, or in response to external stimuli such as physiological stresses, pathogens, metal ions, or inducing agents. The selection of a particular promoter and enhancer depends on the recipient cell type. Some eukaryotic promoters and enhancers have a broad host range while others are functional in a limited subset of cell types. Representative examples of promoters include the bacteriophage T7 promoter, bacteriophage T3 promoter, SP6 promoter, lac operator-promoter, tac promoter, SV40 late promoter, SV40 early promoter, RSV-LTR promoter, CMV IE promoter, SV40 early promoter or SV40 late promoter, human U6 (hU6) promoter, and CMV IE promoter. A promoter and/or enhancer can be “endogenous,” “exogenous,” or “heterologous” with respect to the gene to which it is operably linked. An “endogenous” promoter/enhancer is one which is naturally linked with a given gene in the genome. An “exogenous” or “heterologous” enhancer or promoter is one which is not normally linked with a given gene but is placed in operable linkage with a gene by genetic manipulation.

[0059] As used herein, the term “heterologous” refers to a nucleic acid or polypeptide comprising two or more subsequences that are not found in the same relationship to each other in nature. For instance, a nucleic acid that is recombinantly produced typically has two or more sequences from unrelated genes synthetically arranged to make a new functional nucleic acid, such as, a promoter from one source and a coding region from another source. The two nucleic acids are thus heterologous to each other in this context. When added to a cell, the recombinant nucleic acids would also be heterologous to the endogenous genes of the cell.

[0060] “Sample” or “test sample” as used herein can mean any sample in which the presence and/or level of a target is to be detected or determined or any sample comprising a DNA targeting system or component thereof as detailed herein. Samples may include liquids, solutions, emulsions, or suspensions. Samples may include a medical sample. Samples may include any biological fluid or tissue, such as blood, whole blood, fractions of blood such as plasma and serum, muscle, interstitial fluid, sweat, saliva, urine, tears, synovial fluid, bone marrow, cerebrospinal fluid, nasal secretions, sputum, amniotic fluid, bronchoalveolar lavage fluid, gastric lavage, emesis, fecal matter, lung tissue, peripheral blood mononuclear cells, total white blood cells, lymph node cells, spleen cells, tonsil cells, cancer cells, tumor cells, bile, digestive fluid, skin, or combinations thereof. In some embodiments, the sample comprises an aliquot. In other embodiments, the sample comprises a biological fluid. Samples can be obtained by any means known in the art. The sample can be used directly as obtained from a patient or can be pre-treated, such as by filtration, distillation, extraction, concentration, centrifugation, inactivation of interfering components, addition of reagents, and the like, to modify the character of the sample in some manner as discussed herein or otherwise as is known in the art.

[0061] “Subject” as used herein can mean a mammal that is in need of the herein described compositions or methods. The subject may be a patient. The subject may be a human or a non-human. The subject may be any vertebrate. The subject may be a mammal. The mammal may be a primate or a non-primate. The mammal can be a non-primate such as, for example, dog, cat, horse, cow, pig, mouse, rat, mouse, camel, llama, goat, rabbit, sheep, hamster, and guinea pig. The mammal can be a primate such as a human. The mammal can be a non-human primate such as, for example, monkey, cynomolgous monkey, rhesus monkey, chimpanzee, gorilla, orangutan, and gibbon. The subject may be of any age or stage of development, such as, for example, an adult, an adolescent, a child, such as age 0-2, 2-4, 2-6, or 6-12, or an infant, such as age 0-1. The subject may be male. The subject may be female. In some embodiments, the subject has a specific genetic marker. The subject may be undergoing other forms of treatment.

[0062] “Substantially identical” can mean that a first and second amino acid or polynucleotide sequence are at least 60%, 65%, 70%, 75%, 80%, 85%, 90%, 95%, 96%, 97%, 98%, or 99% over a region of 1, 2, 3, 4, 5, 6, 7, 8, 9, 10, 11, 12, 13, 14, 15, 16, 17, 18, 19, 20, 21, 22, 23, 24, 25, 30, 35, 40, 45, 50, 55, 60, 65, 70, 75, 80, 85, 90, 95, 100, 200, 300, 400, 500, 600, 700, 800, 900, 1000, 1100 amino acids or nucleotides, respectively.

[0063] “Target gene” as used herein refers to any nucleotide sequence encoding a known or putative gene product that is intended to be corrected or for which its expression is intended to be modulated. The target gene may be a mutated gene involved in a genetic disease. In certain embodiments, the target gene is within or near the 15q11-q13 locus.

[0064] “Target region” as used herein refers to the region of the chromosome to which the DNA Targeting System, Targeted Activator System or Targeted Repressor System is is designed to bind and modulate.

[0065] “Transgene” as used herein refers to a gene or genetic material containing a gene sequence that has been isolated from one organism and is introduced into a different organism. This non-native segment of DNA may retain the ability to produce RNA or protein in the transgenic organism, or it may alter the normal function of the transgenic organism's genetic code. The introduction of a transgene has the potential to change the phenotype of an organism.

[0066] “Treatment” or “therapy” or “treating,” when referring to protection of a subject from a disease, means suppressing, repressing, ameliorating, or completely eliminating the disease. Preventing the disease involves administering a composition of the present invention to a subject at risk of having the disease, prior to onset of the disease. Suppressing the disease involves administering a composition of the present invention to a subject after induction of the disease but before its clinical appearance. Repressing or ameliorating the disease involves administering a composition of the present invention to a subject after clinical appearance of the disease. Such treatment will result in a reduction in the incidence, frequency, severity or duration of symptoms of the disease.

[0067] As used herein, the term “gene therapy” refers to a method of treating a patient wherein polypeptides or nucleic acid sequences are transferred into cells of a patient such that activity and/or the expression of a particular gene is modulated. In certain embodiments, the expression of the gene is suppressed. In certain embodiments, the expression of the gene is enhanced. In certain embodiments, the temporal or spatial pattern of the expression of the gene is modulated.

[0068] “Variant” used herein with respect to a polynucleotide means (i) a portion or fragment of a referenced nucleotide sequence; (ii) the complement of a referenced nucleotide sequence or portion thereof; (iii) a nucleic acid that is at least 60%, 65%, 70%, 75%, 80%, 85%, 90%, 95%, 96%, 97%, 98%, or 99%, or less than 100% identical to a referenced nucleic acid or the complement thereof over its full length or over a region of 1, 2, 3, 4, 5, 6, 7, 8, 9, 10, 11, 12, 13, 14, 15, 16, 17, 18, 19, 20, 21, 22, 23, 24, 25, 30, 35, 40, 45, 50, 55, 60, 65, 70, 75, 80, 85, 90, 95, 100, 200, 300, 400, 500, 600, 700, 800, 900, 1000, 1100 nucleotides; or (iv) a nucleic acid that hybridizes under stringent conditions to the referenced nucleic acid, or complement thereof.

[0069] “Variant” with respect to a peptide or polypeptide means a polypeptide that differs in amino acid sequence from a referenced amino acid sequence by the insertion, deletion, and/or conservative substitution of amino acids, such as, at least 60%, 65%, 70%, 75%, 80%, 85%, 90%, 95%, 96%, 97%, 98%, or 99%, or less than 100% identical over its full length or over a region of 1, 2, 3, 4, 5, 6, 7, 8, 9, 10, 11, 12, 13, 14, 15, 16, 17, 18, 19, 20, 21, 22, 23, 24, 25, 30, 35, 40, 45, 50, 55, 60, 65, 70, 75, 80, 85, 90, 95, 100, 200, 300, 400, 500, 600, 700, 800, 900, 1000, 1100 amino acids, but which retains at least one biological activity. Representative examples of “biological activity” include the ability to be bound by a specific antibody or polypeptide or to promote a physiological response. Variant can mean a functional fragment thereof. Variant can also mean multiple copies of a polypeptide. The multiple copies can be in tandem or separated by a linker. A conservative substitution of an amino acid, i.e., replacing an amino acid with a different amino acid of similar properties (such as, hydrophilicity, degree and distribution of charged regions) is recognized in the art as typically involving a minor change. These minor changes may be identified, in part, by considering the hydropathic index of amino acids, as understood in the art. Kyte et al., J. Mol. Biol. 157:105-132 (1982). The hydropathic index of an amino acid is based on a consideration of its hydrophobicity and charge. It is known in the art that amino acids of similar hydropathic indexes may be substituted and still retain protein function. In one aspect, amino acids having hydropathic indexes of ±2 are substituted. The hydrophilicity of amino acids may also be used to reveal substitutions that would result in proteins retaining biological function. A consideration of the hydrophilicity of amino acids in the context of a peptide permits calculation of the greatest local average hydrophilicity of that peptide. Substitutions may be performed with amino acids having hydrophilicity values within ±2 of each other. Both the hydrophobicity index and the hydrophilicity value of amino acids are influenced by the particular side chain of that amino acid. Consistent with that observation, amino acid substitutions that are compatible with biological function are understood to depend on the relative similarity of the amino acids, and particularly the side chains of those amino acids, as revealed by the hydrophobicity, hydrophilicity, charge, size, and other properties.

[0070] “Vector” as used herein means a nucleic acid construct capable of directing the delivery or transfer of a polynucleotide sequence to target cells, where it can be replicated or expressed. A vector may contain an origin of replication, one or more regulatory elements, and/or one or more coding sequences. A vector can be integrating or non-integrating. Major types of vectors include, but are not limited to, a plasmids, episomal vectors, viral vectors, cosmids, and artificial chromosomes. A vector may be a DNA or RNA vector. A vector may be a self-replicating extrachromosomal vector. A vector may be a DNA plasmid. The vector may be non-viral. The vector may be viral. Viral vectors include, but are not limited to, adenovirus vector, adeno-associated virus vector, retrovirus vector, or lentivirus vector. A vector may be delivered within a nanoparticle, such as a lipid nanoparticle or polymeric nanoparticle.

[0071] Unless otherwise defined herein, scientific and technical terms used in connection with the present disclosure shall have the meanings that are commonly understood by those of ordinary skill in the art. For example, any nomenclatures used in connection with, and techniques of, cell and tissue culture, molecular biology, immunology, microbiology, genetics and protein and nucleic acid chemistry and hybridization described herein are those that are well known and commonly used in the art. The meaning and scope of the terms should be clear: in the event however of any latent ambiguity, definitions provided herein take precedent over any dictionary or extrinsic definition. Further, unless otherwise required by context, singular terms shall include pluralities and plural terms shall include the singular.

### 2. PRADER-WILLI SYNDROME (PWS)

[0072] Prader-Willi Syndrome (PWS) is a rare genetic disease with a prevalence ranging from approximately one in 8,000 to one in 25,000 patients in the U.S. Prader-Willi Syndrome (PWS) is a neuroendocrine and neurobehavioral disorder associated with genetic and epigenetic abnormalities. It is believed that the genetics underlying PWS involve a loss of function of one or more genes on chromosome 15 in humans, in particular, within the PWS region 15q11-13 (Schaaf et al. Nat. Genet. 2013, 45, 1405-09, incorporated herein by reference). Individuals with PWS display mild cognitive impairment and develop a false mental state of starvation that causes hyperphagia beginning in childhood, often resulting in extreme obesity unless strict environmental controls are enforced by caregivers to physically limit access to food. Other symptoms include neonatal hypotonia (weak muscles at birth), growth hormone deficiency, behavioral disturbances such as tantrums, outbursts and self-harm, anxiety, and compulsivity.

[0073] While the exact genetic basis of PWS remains unclear, patient mutation profiles have implicated a snoRNA cluster SNORD116 downstream of the SNURF-SNRPN open reading frame controlled by a CpG island imprinting center as a likely contributor to the disease etiology. The genes implicated in PWS are typically expressed only from the paternal copy of chromosome 15, while the PWS genes present on the maternal chromosome are epigenetically silenced. Thus, for example, a patient with paternal deletions or mutations within 15q11.2-13 can present with PWS while retaining functional copies of these genes on the maternal allele. Seventy percent of PWS cases are caused by a large 4-5 Mb deletion on the paternal allele. Twenty-five percent of PWS cases are caused by uniparental maternal disomy (UPD) 15, in which two copies of the maternal chromosome are inherited instead of one copy from each parent. Infrequently, PWS is caused by mutations or microdeletions of the PWS imprinting center (imprinting defects). Exceedingly rare cases of PWS are caused by paternal microdeletions of PWS critical region genes, including SNORD116. Microdeletions or epimutations of the imprinting center account for approximately 2-5% of cases (Bittel and Butler, Expert Rev. Mot. Med. 2005, 7, 1-20; Cassidy and Driscoll, Eur. J. Hum. Genet. 2009, 17, 3-13; each incorporated herein by reference). Thus, the vast majority of individuals with PWS have at least one “good” (unmutated from a DNA sequence perspective) copy of the PWS chromosomal region in every cell. The vast majority of individuals with UPD have two good copies.

[0074] There are several imprinted genes within the 15q11-13 locus (the PWS-associated locus), including the paternally-expressed coding genes MAGEL2, NDN and SNURF-SNRPN, and MKRN3, along with numerous noncoding RNAs (ncRNAs), including the snoRNA clusters SNORD115 and SNORD116. As noted above, PWS patient genotypes most commonly consist of deletions within 15q11-13 that encompass both coding and noncoding genes, although a rare subset of genotypes emphasize the snoRNA clusters as having particular influence in the etiology of PWS (Bieth et al., Eur. J. Hum. Genet. 2015, 23, 252-255; de Smith et al., Hum. Mot. Genet. 2009, 18, 3257-3265; Duker et al., Eur. J. Hum. Genet. 2010, 18, 1196-1201; Sahoo et al., Nat. Genet. 2008, 40, 719-721; each incorporated herein by reference). Further evidence suggests that SNURF-SNRPN and downstream ncRNAs, including SPA RNAs and snoRNAs, are processed from a single host transcript that initiates at the imprinting center located in upstream exon 1 of SNRPN (Wu et al., Mol. Cell 2016, 64, 534-548, incorporated herein by reference).

[0075] Further known genes and gene products of the PWS-associated locus are as follows: NPAP1 (NCBI gene ID: 23742), SNORD107 (snoRNA) (NCBI gene ID: 91380), SNORD64 (snoRNA cluster) (NCBI gene ID: 347686), SNORD109A (snoRNA) (NCBI gene ID: 338428), SNORD116 or SNORD116@ (snoRNA gene cluster) (NCBI gene ID: 692236), SPA1 (long noncoding RNA transcribed from the SNORD116 gene cluster), SPA2 (long noncoding RNA transcribed from the SNORD116 gene cluster) (for SPA1 and SPA2, see V W et al., Mol. Cell 2016, 64, 534-548, incorporated herein by reference), 116HG (long non-coding RNA transcribed from SNORD116 gene cluster) (Kocher et al., Genes 2017, 8, 358, incorporated herein by reference), SNORD116-1 to 30 (snoRNAs or processed snoRNA derivatives transcribed from the SNORD116 cluster) (SNORD116 1-30 NCBI gene ID Nos: 100033413, 100033414, 100033415, 00033416, 100033417, 100033418, 100033419, 100033420, 100033421, 100033422, 100033423, 100033424, 100033425, 100033426, 100033427, 100033428, 100033429, 100033430, 727708, 100033431, 100033432, 100033433, 100033434, 100033435, 100033436, 100033438, 100033439, 100033820, and 100033821, respectively), SNORD116-30: 100873856, Sno-Inc RNA 1 to 5 (long non coding RNA with snoRNA ends transcribed from the SNORD116 cluster) (Yin et al., Mol. Cell 2012, 48, 219-230, incorporated herein by reference), IPW (long noncoding RNA) (NCBI gene ID: 3653), SNORD115 or SNORD115@ (noncoding snoRNA cluster) (NCBI gene ID: 493919), 115HG (long noncoding snoRNA transcribed from SNORD115 cluster) (Powell et al., Hum. Molec. Genet. 2013, 22, 4318-4328, incorporated herein by reference), SNORD115-1 to 48 (snoRNAs or processed snoRNA derivates transcribed from SNORD115 cluster) (SNORD115 1-48 NCBI gene ID Nos: 338433, 100033437, 100033440, 100033441, 100033442, 100033443, 100033444, 100033445, 100033446, 100033447, 100033448, 100033449, 100033450, 100033451, 100033453, 100033454, 100033455, 100033456, 100033458, 100033460, 100033603, 100033799, 100033800, 100036563, 100033801, 100033802, 100036564, 100036565, 100033803, 100033804, 100033805, 100033806, 100033807, 100033808, 100033809, 100033810, 100033811, 100033812, 100033813, 100033814, 100033815, 100033816, 100033817, 100033818, 100036566, 100873857, 100036567, 100033822, or SNORD109B (snoRNA) (NCBI gene ID: 338429), or SNHG14 (PWS region long transcript) (NCBI gene ID: 104472715). In some embodiments, the gene within the 15q11-13 locus is selected from, for example, SNRPN, SNORD115, SNORD116, SNORD109A, IPW and/or MAGEL2.

[0076] Prader-Willi-like syndromes and disorders may include but are not limited to PWS-like syndrome, PWS Type 1 large deletion, PWS Type 2 large deletion, PWS imprinting center mutation or PWS uniparental disomy, PWS microdeletion, atypical deletion encompassing MAGEL2, Scaaf Yang Syndrome (SYS), Chitayat-Hall Syndrome, MAGEL2 disorder, MAGEL2 related disorders, and deletions encompassing Mage12 but not SNORD116. Schaaf-Yang Syndrome (SYS) or MAGEL2-related disorder is a disorder caused by paternally inherited truncating mutations in the MAGEL2 gene (McCarthy et al. Am. J. Med. Genet. A. 2018, 176, 2564-2574, incorporated herein by reference). Chitayat-Hall syndrome can also be cause by paternally inherited truncating mutations in the MAGEL2 gene (Jobling et al. J. Med. Genet. 2018, 55, 316-321, incorporated herein by reference).

[0077] MAGEL2 is a maternally imprinted gene in the PWS region. Patients with Schaaf-Yang syndrome (SYS) display many overlapping symptoms as patients with PWS, including neonatal hypotonia, feeding difficulties during infancy, global developmental delay, and intellectual disabilities (McCarthy et al. Am. J. Med. Genet. A. 2018, 176, 2564-2574, incorporated herein by reference). However, there are several features that do not overlap with PWS. Individuals with SYS very commonly present with arthrogryposis or joint contractures which have never been reported in PWS. Additionally, people with SYS have a higher prevalence of Autism spectrum disorder than is observed in people with PWS. MAGEL2 is a monoexonic gene and therefore missense mutations are not subject to nonsense mediated decay. This, along with the additional phenotypes observed in SYS that are not seen in PWS, or in paternal deletions encompassing MAGEL2 but not SNORD116, suggests that the truncated forms of MAGEL2 present in SYS may have dominant negative activity. Although SYS does not completely overlap with PWS, it demonstrates the importance of the loss of function of the MAGEL2 gene to the PWS phenotype.

[0078] The DNA targeting systems detailed herein, such as one or more Targeted Activator Systems or one or more Targeted Repressor Systems as described herein, may be used to treat a subject with, for example, any of the following disorders: PWS, PWS-like syndrome, PWS Type 1 large deletion, PWS Type 2 large deletion, PWS imprinting center mutation or PWS uniparental disomy; PWS microdeletion, atypical deletion encompassing MAGEL2, Heterozygous Schaaf-Yang syndrome. Chitayat-Hall syndrome, MAGEL2 disorder, MAGEL2-related disorder.

[0079] DNA targeting system(s), including one or more Targeted Activator Systems or one or more Targeted Repressor Systems, can be delivered, such as via gene therapy, to cells of the patients to be treated. The Targeted Activator Systems are designed to target the target regions identified herein as amenable to increasing PWS gene expression through administration of activators. The Targeted Repressor Systems are designed to target the target regions identified herein as amenable to increasing PWS gene expression through administration of repressors. Alternatively, the gene therapy methods of the disclosure can be accomplished by CRISPR/Cas9 based gene editing to incorporate an insertion, deletion and/or substitution in any of the target regions identified herein that eliminates the imprinting (silencing) of the PWS region genes.

[0080] The disclosure also contemplates that expression of one or more of the following genes or gene products (including noncoding RNAs) or clusters is upregulated, i.e., increased, in the subject by administration of the DNA targeting system(s) described herein: MKRN3 (gene), MAGEL2 (gene), NDN (gene), C150RF2, SNURF-SNRPN (gene), SNORD107 (snoRNA), SNORD64 (snoRNA cluster), SNORD109A (snoRNA), SNORD116 or SNORD116@ (snoRNA gene cluster), SPA1 (long noncoding RNA transcribed from the SNORD116 gene cluster), SPA2 (long noncoding RNA transcribed from the SNORD118 gene cluster), 116HG (long non-coding RNA transcribed from SNORD116 gene cluster), SNORD116-1 to 30 (snoRNAs transcribed from the SNORD116 cluster), Sno-Inc RNA 1 to 5 (long non coding RNA with snoRNA ends transcribed from the SNORD116 cluster), IPW (long noncoding RNA), SNORD115 or SNORD115@ (noncoding snoRNA cluster), 115HG (long noncoding snoRNA transcribed from SNORD115 cluster), SNORD115-1 to 48 (snoRNAs transcribed from SNORD115 cluster), SNORD109B (snoRNA), or SNHG14 (PWS region long transcript).

[0081] In some embodiments, the DNA targeting system as described herein targets a region that results in increased expression of SNORD118, or increased expression of MAGEL2, or both. In some embodiments, a first Targeted Activator System targets a region that results in increased expression of SNORD116 and a second Targeted Activator System targets a region that results in increased expression of MAGEL2. The disclosure contemplates that additional Targeted Activator Systems may be utilized concurrently. In some embodiments, a first Targeted Repressor System targets a region that results in increased expression of SNORD116 and a second Targeted Repressor System targets a region that results in increased expression of MAGEL2. The disclosure contemplates that additional Targeted Repressor Systems may be utilized concurrently. Multiple DNA targeting systems may be utilized concurrently.

[0082] The treatment methods as described herein, for PWS, may result in amelioration/reduction of symptoms including, for example, hypotonia, growth hormone deficiency, infantile failure to thrive, global developmental delay, neonatal hypophagia, anxiety, obsessive compulsive disorder, obsessive compulsive-like disorder, intellectual impairment, intellectual disability, hyperphagia, obesity due to hyperphagia, metabolic syndrome secondary to obesity, type 2 diabetes in PWS, behavioral disturbances such as tantrums, outbursts and self-harm, anxiety and compulsivity, and/or skin picking. Other characteristics or symptoms may include small hands, small feet, straight ulnar borders on hands, characteristic facial features: almond shaped eyes, thin upper lip, temperature instability, chronic constipation, decreased gut/intestinal motility, scoliosis, hyperghrelinemia, and/or hypoinsulinemia.

[0083] The treatment methods as described herein, for SYS, may result in amelioration of symptoms including neonatal hypotonia, growth hormone deficiency, infantile failure to thrive, global developmental delay, hyperghrelinemia, autism spectrum disorder, infantile respiratory distress, gastroesophageal reflux, chronic constipation, skeletal abnormalities, sleep apnea, temperature instability, and/or arthrogryposis.

### 3. DNA TARGETING SYSTEMS

[0084] A “DNA targeting system” as used herein is a system capable of specifically targeting a particular region of DNA and modulating gene expression by binding to that region. Non-limiting examples of these systems are CRISPR-Cas-based systems, zinc finger (ZF)-based systems, and/or transcription activator-like effector (TALE)-based systems. The DNA targeting system may be a nuclease system that acts through mutating or editing the target region (such as by insertion, deletion or substitution) or it may be a system that delivers a functional second polypeptide domain, such as an activator or repressor, to the target region. The DNA targeting system may comprise a Cas protein or a fusion protein, wherein the fusion protein comprises two heterologous polypeptide domains, and wherein the first polypeptide domain comprises a DNA-binding protein. The DNA-binding protein may comprise a Cas protein, a zinc finger protein, or a transcription activator-like effector (TALE) protein. DNA targeting systems are also described in International Patent Application No. PCT/US2021/054292, published as WO/2022/076901, and International Patent Application No. PCT/US2020/54160, published as WO/2021/067878, each of which is incorporated herein by reference.

[0085] A “DNA targeting system” may be a Targeted Activator System, or a Targeted Repressor System, or a combination thereof. A “Targeted Activator System” as used herein is a system capable of specifically targeting a particular region of DNA and activating gene expression by binding to that target region. A “Targeted Repressor System” as used herein is a system capable of specifically targeting a particular region of DNA and repressing gene expression by binding to that target region.

[0086] As indicated above, each of these systems may comprise a DNA-binding portion or domain, such as a Cas protein with guide RNA, a zinc finger protein (ZF), or a transcription activator-like effector (TALE) protein, that specifically recognizes and binds to a particular target region of a target DNA. The DNA-binding portion (for example, Cas9 protein, ZF, or TALE) can be linked to a second protein domain, such as a polypeptide with transcription activation activity, transcription repression activity, transcription release factor activity, histone modification activity, nuclease activity, nucleic acid association activity, methylase activity, demethylase activity, acetylation activity, or deacetylation activity. For example, the DNA-binding portion can be linked to an activator and thus guide the activator to a specific target region of the target DNA. Similarly, the DNA-binding portion can be linked to a repressor and thus guide the repressor to a specific target region of the target DNA.

[0087] Some CRISPR-Cas-based systems can operate to activate or repress expression using the Cas protein alone, not linked to an activator or repressor. For example, a nuclease-null Cas9 can act as a repressor on its own, or a nuclease-active Cas9 can act as an activator when paired with an inactive (dead) guide RNA. In addition, RNA or DNA that hybridizes to a particular target region of the target DNA can be directly linked (covalently or non-covalently) to an activator or repressor.

### 4. CRISPR/CAS9-BASED GENE EDITING SYSTEM

[0088] The gene therapy methods of the disclosure can be accomplished by administering a DNA targeting system, such as Targeted Activator System or Targeted Repressor System, that comprises a CRISPR-Cas-based system, which may comprise (a) one or more guide RNAs and (b) one or more Cas polypeptides. In some embodiments, the Cas polypeptides are fusion proteins comprising a Cas protein or fragment or variant thereof, and a second heterologous polypeptide domain. Administration of the DNA targeting system may upregulate expression of one or more genes within the 15q11-13 locus. Alternatively, the gene therapy methods of the disclosure can be accomplished by CRISPR/Cas9 based gene editing to incorporate an insertion, deletion, and/or substitution that eliminates the imprinting (silencing) of the PWS region genes.

[0089] CRISPR (Clustered Regularly Interspaced Short Palindromic Repeats)-Cas, refers to RNA-guided endonuclease systems that comprise (a) an RNA portion that guides the endonuclease system to target DNA by hybridizing to a DNA sequence within the target region of the target DNA, and (b) a nuclease portion that binds to and cleaves the target DNA at or near that location. The most commonly used CRISPR-Cas systems are the Type II CRISPR systems, such as CRISPR-Cas9 or CRISPR-Cpf1, in which the nuclease portion is a single enzyme. However, multi-protein nuclease systems, such as the Type I system, can be harnessed for the same purpose. One example of such a Type I multi-protein nuclease complex is described in U.S. Patent Appl. Pub. No. 2018/0334688, incorporated by reference herein in its entirety. Another example of a Cpf1-based complex is described in U.S. Patent Appl. Pub. No. 2019/0151476, incorporated by reference herein in its entirety

[0090] Provided herein are genetic constructs for genome editing, genomic alteration, or altering gene expression of a gene, for example, on chromosome 15, for the treatment of PWS, PWS-like syndrome, PWS Type 1 large deletion, PWS Type 2 large deletion, PWS imprinting center mutation or PWS uniparental disomy; PWS microdeletion, atypical deletion encompassing MAGEL2, Heterozygous Schaaf-Yang syndrome, Chitayat-Hall syndrome, MAGEL2 disorder, or MAGEL2-related disorder. The genetic constructs may include at least one gRNA that targets a target region, such as a gene sequence or a regulatory element thereof. The disclosed gRNAs can be included in a CRISPR/Cas9-based gene editing system to target regions in the 15q11-13 imprinted locus, or a regulatory element of a gene within the 15q11-13 locus, causing activation of imprinted genes within the 15q11-13 locus in cells from patients such as PWS patients.

[0091] In some embodiments, the at least one gRNA targets an activating regulatory element of a gene within the 15q11-13 locus. In some embodiments, the gRNA may be combined with a Cas9 protein that introduces a mutation in the regulatory element such as an insertion, deletion, and/or substitution, as detailed below, such that the activity of the activating regulatory element is increased, thereby activating expression of the maternal gene within the 15q11-13 locus for the treatment of PWS. In other embodiments, the at least one gRNA targets an inhibitory regulatory element of a gene within the 15q11-13 locus. In some embodiments, the gRNA may be combined with a Cas9 protein that introduces a mutation in the regulatory element such as an insertion, deletion, and/or substitution, as detailed below, such that the activity of the inhibitory regulatory element is decreased, thereby activating expression of the maternal gene within the 15q11-13 locus for the treatment of PWS.

[0092] In some embodiments, the gRNA may be combined with a fusion protein that activates transcription, as detailed below, such that the activity of the activating regulatory element is increased, thereby activating expression of an imprinted gene within the 15q11-13 locus for the treatment of PWS.

[0093] In other embodiments, the gRNA may be combined with a fusion protein that represses transcription, as detailed below, such that the activity of the inhibitory regulatory element is decreased, thereby activating expression of the maternal gene within the 15q11-13 locus for the treatment of PWS.

[0094] A CRISPR/Cas9-based system may be specific for a gene within the 15q11-13 locus or a regulatory element thereof.

[0095] “Clustered Regularly Interspaced Short Palindromic Repeats” and “CRISPRs”, as used interchangeably herein, refers to loci containing multiple short direct repeats that are found in the genomes of approximately 40% of sequenced bacteria and 90% of sequenced archaea. The CRISPR system in nature is a microbial nuclease system involved in defense against invading phages and plasmids that provides a form of acquired immunity. The CRISPR loci in microbial hosts contain a combination of CRISPR-associated (Cas) genes as well as non-coding RNA elements capable of programming the specificity of the CRISPR-mediated nucleic acid cleavage. Short segments of foreign DNA, called spacers, are incorporated into the genome between CRISPR repeats, and serve as a “memory” of past exposures.

[0096] CRISPR (Clustered Regularly Interspaced Short Palindromic Repeats)-Cas, refers to RNA-guided endonuclease systems that comprise (a) an RNA portion that guides the endonuclease system to target DNA by hybridizing to a DNA sequence within the target region of the target DNA, and (b) a nuclease portion that binds to and cleaves the target DNA at or near that location.

[0097] Three classes of CRISPR systems (Types I, II, and III effector systems) are known. The natural Type II effector system carries out targeted DNA double-strand breaks using a complex comprising a single effector enzyme, Cas9, together with a duplex of two RNAs, a crRNA and a tracrRNA. Collectively, the duplex of two RNAs is called the “guide RNA.” A predefined 20 bp portion at the 5′ end of the natural crRNA recognizes its target by complementary base pairing to a DNA sequence of the target DNA. This 20 bp portion may be swapped for a different portion of similar nucleotide length to change the target recognition of the Type II effector system. The CRISPR-Cas systems can target multiple distinct genomic loci by co-expressing a single Cas9 or Cpf1 protein with two or more guide RNA.

[0098] An engineered improvement to this system links the two RNAs together, either via chemical covalent linkage, or with a nucleotide linker (such as GAAA), to form a single guide RNA (sgRNA). As explained below, the RNA(s) can be chemically modified to improve stability and reduce degradation in the cellular environment. Type II Cas9 systems and their use in Targeted Activator Systems are described, such as in Perez-Pinera et al., Nat. Methods 2013, 10, 973-976, incorporated herein by reference. Type II Cpf1 systems and their use in Targeted Activator Systems are described, such as in Zhang et al., Protein Cell 2018, 9, 380-383, incorporated herein by reference.

[0099] For DNA cleavage, the DNA sequence recognized by the crRNA may also be immediately followed by the protospacer-adjacent motif (PAM), a short sequence recognized by the Cas9. Different Cas9 from different bacteria have differing PAM requirements. For example, the PAM for Streptococcus pyogenes (S. pyogenes) Cas9 (SpCas9) as 5′-NRG-3′, where R is either A or G. Thus, the DNA-targeting mechanism of the type II CRISPR-Cas9 system involves a guide RNA which directs the Cas9 endonuclease to cleave the target DNA in a sequence-specific manner, dependent on the presence of a Protospacer Adjacent Motif (PAM) on the target DNA.

[0100] For example, the S. pyogenes Type II system naturally prefers to use an “NGG” sequence, where “N” can be any nucleotide, but also accepts other PAM sequences, such as “NAG” in engineered systems (Hsu et al., Nature Biotechnology 2013 doi:10.1038/nbt.2647, incorporated by reference). Similarly, the Cas9 derived from Neisseria meningitidis (NmCas9) normally has a native PAM of NNNNGATT, but has activity across a variety of PAMs, including a highly degenerate NNNNGNNN PAM (Esvelt et al. Nature Methods 2013 doi:10.1038/nmeth.2681, incorporated by reference).

[0101] A Cas9 protein of Staphylococcus aureus (S. aureus) recognizes the sequence motif NNGRR (R=A or G) (SEQ ID NO: 19) and directs cleavage of a target nucleic acid sequence 1 to 10, such as, 3 to 5, bp upstream from that sequence. In certain embodiments, a Cas9 protein of S. aureus recognizes the sequence motif NNGRRN (R=A or G) (SEQ ID NO: 20) and directs cleavage of a target nucleic acid sequence 1 to 10, such as, 3 to 5, bp upstream from that sequence. In certain embodiments, a Cas9 protein of S. aureus recognizes the sequence motif NNGRRT (R=A or G) (SEQ ID NO: 21) and directs cleavage of a target nucleic acid sequence 1 to 10, such as, 3 to 5, bp upstream from that sequence. In certain embodiments, a Cas9 protein of S. aureus recognizes the sequence motif NNGRRV (R=A or G) (SEQ ID NO: 22) and directs cleavage of a target nucleic acid sequence 1 to 10, such as, 3 to 5, bp upstream from that sequence. In the aforementioned embodiments, N can be any nucleotide residue, such as, any of A, G, C, or T. Cas9 proteins can be engineered to alter the PAM specificity of the Cas9 protein.

a. Cas Protein

[0102] The CRISPR/Cas9-based gene editing system can include a Cas protein or a Cas fusion protein. The Cas9 protein can be from any bacterial or archaea species, including, but not limited to, Streptococcus pyogenes (also in U.S. Patent Appl. Pub. No. 2019/0127713, incorporated by reference herein in its entirety), Staphylococcus aureus (S. aureus) (also in U.S. 2019/0127713, incorporated by reference herein in its entirety), Streptococcus thermophilus (LMD-9, YP_820832.1), L. innocua (Clip11262, NP_472073.1), Acidovorax avenae, Actinobacillus pleuropneumoniae, Actinobacillus succinogenes, Actinobacillus suis, Actinomyces sp., cycliphilus denitrinfcans, Aminomonas paucivorans, Azospirillum, Bacillus cereus, Bacillus smithii, Bacillus thunngiensis, Bacteroides sp., Blastopirellula manna, Bradyrhizobium sp., Brevibacillus laterosporus, Campylobacter coli, Campylobacterjejuni (subsp. jejuni NCTC 11168, YP_002344900.1), Campylobacter lari, Candidatus puniceispirillum, Clostridium cellulolyticum, Clostrdium perfringens, Corynebacterium accolens, Corynebacterium diphtheria, Corynebactenum matruchotii, Dinoroseobacter shibae, Eubacterium dolichum, Eubacterium ventriosum, gamma proteobacterium, Gluconacetobacter diazotrophicus. Haemophilus parainfluenzae, Haemophilus sputorum, Helicobacter canadensis, Helicobacter cinaedi. Helicobacter mustelae, Ilyobacter polytropus, Kingella kingae, Lactobacillus crispatus, Lactobacillus farciminis, Listeria ivanovii, Listeria monocytogenes, Listeriaceae bacterium, Methylocystis sp., Methylosinus trichosporium, Mobiluncus mulieris, Neisseria bacilliformis, Neisseria cinerea, Neisseria flavescens, Neisseria lactamica, N. meningitidis (Z2491, YP_002342100.1), Neisseria sp., Neisseria wadsworthii, Nitratifractor salsuginis, Nitrosomonas sp., Parvibaculum lavamentivorans, Pasteurela multocida, Phascolarctobacterium succinatutens, Ralstonia syzygii, Rhodopseudomonas palustris, Rhodovulum sp., Roseburia intestinalis, Simonsiella muelleri, Sphaerochaeta, Sphingomonas sp., Sporolactobacillus vineae, Staphylococcus lugdunensis, Streptococcus sp., Streptococcus pasteurianus, Subdoligranulum sp., Tistrella mobilis, Treponema sp., or Verminephrobacter eiseniae. CRISPR loci have been identified in more than 40 prokaryotes (See such as, Jansen et al., Mol. Microbiol. 2002, 43, 1565-1575; and Mojica et al., J. Molec. Evolution 2005, 60, 174-182; each incorporated herein by reference) including, but not limited to Aeropyrum, Pyrobaculum, Sulfolobus, Archaeoglobus, Halocarcula, Methanobacterium, Methanococcus, Methanosarcina, Methanopyrus, Pyrococcus, Picrophilus, Thermoplasma, Corynebacterium, Mycobacterium, Streptomyces, Aquifex, Porphyromonas, Chlorobium, Thermus, Bacillus, Listeria, Staphylococcus, Clostridium, Thermoanaerobacter, Mycoplasma, Fusobacterium, Azarcus, Chromobacterium, Neisseria, Nitrosomonas, Desulfovibrio, Geobacter, Myxococcus, Campylobacter, Wolinella, Acinetobacter, Erwinia, Escherichia, Legionella, Methylococcus, Pasteurella, Photobacterum, Salmonella, Xanthomonas, Yersinia, Treponema, and Thermotoga.

[0103] In certain embodiments, the Cas9 protein is a Streptococcus pyogenes Cas9 protein (also referred herein as “SpCas9”) or a variant thereof. In certain embodiments, the Cas9 protein is a Staphylococcus aureus Cas9 protein (also referred herein as “SaCas9”) or a variant thereof.

[0104] The Cas polypeptide can also comprise a modified form of the Cas polypeptide that retains DNA-targeting activity and is at least 65% identical, preferably at least 70%, 75%, 80%, 85%, 90%, 95%, 96%, 97%, 98%, or at least 99% identical to a naturally occurring Cas protein amino acid sequence. The modified form of the Cas polypeptide can include an amino acid change (such as, deletion, insertion, and/or substitution) that reduces the naturally occurring nuclease activity of the Cas protein. For example, in some instances, the modified form of the Cas protein has less than 50%, less than 40%, less than 30%, less than 20%, less than 10%, less than 5%, or less than 1% of the nuclease activity of the corresponding wild-type Cas polypeptide (US20140068797, incorporated by reference). In some cases, the modified form of the Cas polypeptide has no substantial nuclease activity and is referred to as “nuclease null” or “deactivated” Cas (dCas). For Cas9, this can be accomplished, such as, by mutating one or both of the nuclease domains of Cas9, the HNH domain or the RuvC domain. Each of these nuclease domains is responsible for cleaving one of the two strands of the target DNA. For S. pyogenes cas9, mutations at positions 10 and 840 (such as D10A, H840A) render it nuclease null. For S. aureus Cas9, mutations at positions 10 and 580 (such as D10A, N580A) render it nuclease null.

[0105] The ability of a Cas9 protein or a Cas9 fusion protein to recognize a PAM sequence can be determined, such as, using a transformation assay as known in the art. In certain embodiments, the ability of a Cas9 protein or a Cas9 fusion protein to interact with and cleave a target nucleic acid is PAM sequence dependent. A PAM sequence is a sequence in the target nucleic acid. In certain embodiments, cleavage of the target nucleic acid occurs upstream from the PAM sequence. Cas9 proteins from different bacterial species can recognize different sequence motifs (such as, PAM sequences). In certain embodiments, a Cas9 protein of S. pyogenes recognizes the sequence motif NGG and directs cleavage of a target nucleic acid sequence 1 to 10, such as, 3 to 5, bp upstream from that sequence. In certain embodiments, a Cas9 protein of S. thermophilus recognizes the sequence motif NGGNG (SEQ ID NO: 33) and/or NNAGAAW (W=A or T) (SEQ ID NO: 17) and directs cleavage of a target nucleic acid sequence 1 to 10, such as, 3 to 5, bp upstream from these sequences. In certain embodiments, a Cas9 protein of S. mutans recognizes the sequence motif NGG and/or NAAR (R=A or G) (SEQ ID NO: 18) and directs cleavage of a target nucleic acid sequence 1 to 10, such as, 3 to 5 bp, upstream from this sequence. In certain embodiments, a Cas9 protein of S. aureus recognizes the sequence motif NNGRR (R=A or G) (SEQ ID NO: 19) and directs cleavage of a target nucleic acid sequence 1 to 10, such as, 3 to 5, bp upstream from that sequence. In certain embodiments, a Cas9 protein of S. aureus recognizes the sequence motif NNGRRN (R=A or G) (SEQ ID NO: 20) and directs cleavage of a target nucleic acid sequence 1 to 10, such as, 3 to 5, bp upstream from that sequence. In certain embodiments, a Cas9 protein of S. aureus recognizes the sequence motif NNGRRT (R=A or G) (SEQ ID NO: 21) and directs cleavage of a target nucleic acid sequence 1 to 10, such as, 3 to 5, bp upstream from that sequence. In certain embodiments, a Cas9 protein of S. aureus recognizes the sequence motif NNGRRV (R=A or G; V=A or C or G) (SEQ ID NO: 22) and directs cleavage of a target nucleic acid sequence 1 to 10, such as, 3 to 5, bp upstream from that sequence. In the aforementioned embodiments, N can be any nucleotide residue, such as, any of A, G, C, or T. Cas9 proteins can be engineered to alter the PAM specificity of the Cas9 protein.

[0106] In certain embodiments, the vector encodes at least one Cas9 protein that recognizes a Protospacer Adjacent Motif (PAM) of either NNGRRT (SEQ ID NO: 21) or NNGRRV (SEQ ID NO: 22). In certain embodiments, the at least one Cas9 protein is an S. aureus Cas9 protein. In certain embodiments, the at least one Cas9 protein is a mutant S. aureus Cas9 protein.

[0107] The Cas9 protein can be mutated so that the nuclease activity is inactivated. An inactivated Cas9 protein (“iCas9”, also referred to as “dCas9”) with no endonuclease activity has been targeted to genes in bacteria, yeast, and human cells by gRNAs to silence gene expression through steric hindrance. Exemplary mutations with reference to the S. pyogenes Cas9 sequence to inactivate the nuclease activity include D10A, E762A, H840A, N854A, N863A, and/or D986A. Exemplary mutations with reference to the S. aureus Cas9 sequence to inactivate the nuclease activity include D10A and N580A. In certain embodiments, the Cas9 protein is a mutant S. aureus Cas9 protein.

[0108] In certain embodiments, the mutant S. aureus Cas9 protein comprises a D10A mutation. The nucleotide sequence encoding this mutant S. aureus Cas9 protein is set forth in SEQ ID NO: 31.

[0109] In certain embodiments, the mutant S. aureus Cas9 protein comprises a N580A mutation. The nucleotide sequence encoding this mutant S. aureus Cas9 protein is set forth in SEQ ID NO: 32.

[0110] In some embodiments, the Cas9 protein is a VQR variant. The VQR variant of Cas9 is a mutant with a different PAM recognition, as detailed in Kleinstiver, et al. (Nature 2015, 523, 481-485, incorporated herein by reference).

[0111] A polynucleotide encoding a Cas9 protein can be a synthetic polynucleotide. For example, the synthetic polynucleotide can be chemically modified. The synthetic polynucleotide can be codon optimized, such as, at least one non-common codon or less-common codon has been replaced by a common codon. For example, the synthetic polynucleotide can direct the synthesis of an optimized messenger mRNA, such as, optimized for expression in a mammalian expression system, such as, described herein.

[0112] Additionally or alternatively, a nucleic acid encoding a Cas9 polypeptide may comprise a nuclear localization sequence (NLS). Nuclear localization sequences are known in the art. An exemplary codon optimized nucleic acid sequence encoding a Cas9 protein of S. pyogenes is set forth in SEQ ID NO: 23. The corresponding amino acid sequence of an S. pyogenes Cas9 protein is set forth in SEQ ID NO: 24.

[0113] Exemplary codon optimized nucleic acid sequences encoding a Cas9 protein of S. aureus, and optionally containing nuclear localization sequences (NLSs), are set forth in SEQ ID NOs: 25-29, 34, and 35. Another exemplary codon optimized nucleic acid sequence encoding a Cas9 protein of S. aureus comprises the nucleotides 1293-4451 of SEQ ID NO: 37. An amino acid sequence of an S. aureus Cas9 protein is set forth in SEQ ID NO: 30. An amino acid sequence of an S. aureus Cas9 protein is set forth in SEQ ID NO: 36.

[0114] Alternatively or additionally, the CRISPR/Cas9-based gene editing system can include a fusion protein as described herein.

b. Guide RNA (gRNA)

[0115] In embodiments wherein the DNA-binding protein comprises a Cas protein, the DNA targeting system may further comprise one or more guide RNAs (gRNA). The CRISPR/Cas-based gene editing system includes at least one gRNA molecule. The at least one gRNA molecule can bind and recognize a target region. The guide RNA is the part of the CRISPR-Cas system that provides DNA targeting specificity to the system. The guide RNA comprises at its 5′ end a DNA-targeting domain that is sufficiently complementary to the target region to be able to hybridize to 10 to 20 nucleotides of the target region of the target DNA, when it is followed by an appropriate Protospacer Adjacent Motif (PAM). It has been reported that the specificity of the CRISPR system can be improved by reducing the length of the DNA-targeting domain in the guide RNA to 17-18 nucleotides (Fu et al. Nat. Biotechnol. 2014, 32, 279-284, incorporated herein by reference). The “target region” or “target sequence” or“protospacer” refers to the region of the target gene to which the CRISPR/Cas9-based gene editing system targets and binds. The portion of the gRNA that targets the target sequence in the genome may be referred to as the “targeting sequence” or “targeting portion” or “targeting domain.” “Protospacer” or “gRNA spacer” may refer to the region of the target gene to which the CRISPR/Cas9-based gene editing system targets and binds: “protospacer” or “gRNA spacer” may also refer to the portion of the gRNA that is complementary to the targeted sequence in the genome. The gRNA may include a gRNA scaffold. A gRNA scaffold facilitates Cas9 binding to the gRNA and may facilitate endonuclease activity. The gRNA scaffold is a polynucleotide sequence that follows the portion of the gRNA corresponding to sequence that the gRNA targets. Together, the gRNA targeting portion and gRNA scaffold form one polynucleotide. The constant region of the gRNA may include the sequence of SEQ ID NO: 1141 (RNA), which is encoded by a sequence comprising SEQ ID NO: 1140 (DNA). For example, the sequence of the full gRNA corresponding to SEQ ID NO: 588 (defined below) may be SEQ ID NO: 1142.

[0116] The DNA-targeting domain of the guide RNA does not need to be perfectly complementary to the target region of the target DNA. In example embodiments, the DNA-targeting domain of the guide RNA sequence is at least 80% complementary, preferably at least 85%, 90%, 95%, 96%, 97%, 98%, or at least 99% complementary to (or has 1, 2 or 3 mismatches compared to) the target region over a length of, such as, 10, 11, 12, 13, 14, 15, 16, 17, 18, 19 or 20 nucleotides. For example, the DNA-targeting domain of the guide RNA sequence is at least 80% complementary over at least 18 nucleotides of the target region. The target region may be on either strand of the target DNA.

[0117] The portion of the guide RNA that corresponds to the tracrRNA can be variably truncated and a range of lengths has been shown to function in both a system comprising separate RNAs and a system comprising a single-guide RNA. For example, in some embodiments, tracrRNA may be truncated from its 3′ end by at least 1, 2, 3, 4, 5, 6, 7, 8, 9, 10, 15, 20, 25, 30, 35, or 40 nucleotides. In some embodiments, the tracrRNA may be truncated from its 5′ end by at least 1, 2, 3, 4, 5, 6, 7, 8, 9, 10, 15, 20, 21, 22, 23, 24, or 25 nucleotides. Alternatively, the tracrRNA may be truncated from both the 5′ and 3′ end, such as, by at least 1, 2, 3, 4, 5, 6, 7, 8, 9, 10, 15, or 20 nucleotides on the 5′ end and at least 1, 2, 3, 4, 5, 6, 7, 8, 9, 10, 15, 20, 25, 30, 35, or 40 nucleotides on the 3′ end. See, such as, Jinek et al., Science 2012, 337, 816-821; Mali et al., Science 2013, 339, 823-826; Cong et al., Science 2013, 339, 819-823; and Hwang and Fu et al., Nat. Biotechnol. 2013, 31, 227-229; Jinek et al. Elife 2, 2013, e00471, each incorporated by reference).

[0118] The guide RNAs are complementary to a target region of the genomic target DNA. For example, they are complementary to a target region within about 100-1000, about 100-900, about 100-800, about 100-700, about 100-600, about 100-500, about 100-400, about 100-300 or about 100-200 bp upstream, or downstream, of the target region identified herein. In some embodiments, the gRNAs target the sense strand. In some embodiments, the gRNAs target the antisense strand.

[0119] The guide RNA can be designed to target known transcription response elements (such as, promoters, enhancers, etc.), known upstream activating sequences (UAS), sequences of unknown or known function that are suspected of being able to control expression of the target DNA, etc. In some such cases, the CRISPR-Cas-based DNA targeting system, including Targeted Activator System or Targeted Repressor System, is targeted by the guide RNA to a specific location (i.e., sequence) in the target region of the DNA and exerts locus-specific regulation such as blocking RNA polymerase binding to a promoter (which selectively inhibits transcription activator function), and/or modifying the local chromatin status or epigenetic status (such as modifying the target DNA or proteins associated with the target DNA, such as, nucleosomal histones. In some cases, the changes are transient (such as, transcription repression or activation). In some cases, the changes are inheritable by daughter cells.

[0120] The CRISPR/Cas9-based gene editing system includes at least one gRNA. In any of the embodiments, more than one target region can be targeted with 2, 3, 4, 5, or more gRNAs directed to different sites in the same locus of the target DNA. The at least one gRNA may target an activating regulatory element of a gene within the 15q11-13 locus. The at least one gRNA may target an inhibitory regulatory element of a gene within the 15q11-13 locus. The number of gRNAs encoded by a genetic construct (such as a vector) can be at least 1 gRNA, at least 2 different gRNA, at least 3 different gRNA at least 4 different gRNA, at least 5 different gRNA, at least 6 different gRNA, at least 7 different gRNA, at least 8 different gRNA, at least 9 different gRNA, at least 10 different gRNAs, at least 11 different gRNAs, at least 12 different gRNAs, at least 13 different gRNAs, at least 14 different gRNAs, at least 15 different gRNAs, at least 16 different gRNAs, at least 17 different gRNAs, at least 18 different gRNAs, at least 18 different gRNAs, at least 20 different gRNAs, at least 25 different gRNAs, at least 30 different gRNAs, at least 35 different gRNAs, at least 40 different gRNAs, at least 45 different gRNAs, or at least 50 different gRNAs. The number of gRNAs encoded by a presently disclosed vector can be between at least 1 gRNA to at least 50 different gRNAs, at least 1 gRNA to at least 45 different gRNAs, at least 1 gRNA to at least 40 different gRNAs, at least 1 gRNA to at least 35 different gRNAs, at least 1 gRNA to at least 30 different gRNAs, at least 1 gRNA to at least 25 different gRNAs, at least 1 gRNA to at least 20 different gRNAs, at least 1 gRNA to at least 16 different gRNAs, at least 1 gRNA to at least 12 different gRNAs, at least 1 gRNA to at least 8 different gRNAs, at least 1 gRNA to at least 4 different gRNAs, at least 4 gRNAs to at least 50 different gRNAs, at least 4 different gRNAs to at least 45 different gRNAs, at least 4 different gRNAs to at least 40 different gRNAs, at least 4 different gRNAs to at least 35 different gRNAs, at least 4 different gRNAs to at least 30 different gRNAs, at least 4 different gRNAs to at least 25 different gRNAs, at least 4 different gRNAs to at least 20 different gRNAs, at least 4 different gRNAs to at least 16 different gRNAs, at least 4 different gRNAs to at least 12 different gRNAs, at least 4 different gRNAs to at least 8 different gRNAs, at least 8 different gRNAs to at least 50 different gRNAs, at least 8 different gRNAs to at least 45 different gRNAs, at least 8 different gRNAs to at least 40 different gRNAs, at least 8 different gRNAs to at least 35 different gRNAs, 8 different gRNAs to at least 30 different gRNAs, at least 8 different gRNAs to at least 25 different gRNAs, 8 different gRNAs to at least 20 different gRNAs, at least 8 different gRNAs to at least 16 different gRNAs, or 8 different gRNAs to at least 12 different gRNAs. In certain embodiments, the genetic construct (such as, a vector) encodes one gRNA, i.e., a first gRNA, and optionally a Cas9 protein. In certain embodiments, a first genetic construct (such as, a first vector) encodes one gRNA, i.e., a first gRNA, and optionally a Cas9 protein, and a second genetic construct (such as, a second vector) encodes one gRNA, i.e., a second gRNA, and optionally a Cas9 protein.

[0121] The gRNA may comprise a “G” at the 5′ end of the targeting domain or complementary polynucleotide sequence, such as as a result of in vitro transcription by a T7 RNA polymerase. The DNA-targeting domain of a gRNA may comprise at least a 10 base pair, at least a 11 base pair, at least a 12 base pair, at least a 13 base pair, at least a 14 base pair, at least a 15 base pair, at least a 16 base pair, at least a 17 base pair, at least a 18 base pair, at least a 19 base pair, at least a 20 base pair, at least a 21 base pair, at least a 22 base pair, at least a 23 base pair, at least a 24 base pair, at least a 25 base pair, at least a 30 base pair, or at least a 35 base pair polynucleotide sequence complementary to the target region DNA sequence followed by a PAM sequence. In certain embodiments, the targeting domain of a gRNA has 19-25 nucleotides in length. In certain embodiments, the targeting domain of a gRNA is 20 nucleotides in length. In certain embodiments, the targeting domain of a gRNA is 21 nucleotides in length. In certain embodiments, the targeting domain of a gRNA is 22 nucleotides in length. In certain embodiments, the targeting domain of a gRNA is 23 nucleotides in length.

[0122] The gRNA may target a region within or near the 15q11-q13 locus or a regulatory element thereof. In certain embodiments, the gRNA can target at least one of exons, introns, the promoter region, the enhancer region, or the transcribed region of the gene. In some embodiments, the gRNA targets a gene selected from SNRPN, SNORD115, SNORD116, SPA1, SPA2, and MAGEL2, or a combination thereof. In some embodiments, the gRNA targets a SNRPN activating regulatory element, SNORD115 activating regulatory element, SNORD116 activating regulatory element, or a combination thereof. In some embodiments, the gRNA targets a SNRPN promoter, SNORD115 promoter, SNORD116 promoter, or a combination thereof. The gRNA may include a targeting domain that comprises a polynucleotide sequence corresponding to at least 10, 11, 12, 13, 14, 15, 16, 17, 18, 19, or 20 consecutive bases of any one of SEQ ID NOs: 1-12, or of any one of SEQ ID NOs: 47-86, 91-1122, 591, 585, 685, 697, 750, 752, 763, 771, 196, 812, 861, and 1069 (which are also detailed in International Patent Application No. PCT/US2020/54160, published as WO/2021/067878, incorporated herein by reference; and in TABLE 1, TABLE 2, TABLE 3, TABLE 4) or a complement thereof or an allelic variant thereof. The protospacers and guides represented in TABLE 1 may be useful for targeted delivery of polypeptides that have activator activity. The protospacers and guides represented in TABLE 2 and TABLE 4 may be useful for targeted delivery of polypeptides that have demethylase activity. SEQ ID NOs: 96-516 may be especially useful for targeted delivery of polypeptides that have repressor activity. SEQ ID NOs: 519-580 may be especially useful for targeted delivery of polypeptides that have activator activity when targeted with a pair of gRNAs. The DNA Targeting system may include at least one gRNA corresponding to any one of SEQ ID NOs: 1-12, 47-86, 91-1122, 96-516, 519-580, 591, 585, 685, 697, 750, 752, 763, 771, 196, 812, 861, and 1069, or a truncation, complement, and/or variation thereof. The DNA Targeting system may include at least one gRNA that includes a targeting domain that comprises a polynucleotide sequence corresponding to at least 10, 11, 12, 13, 14, 15, 16, 17, 18, 19, or 20 consecutive bases of any one of SEQ ID NOs: 1-12, 47-86, 91-1122, 591, 585, 685, 697, 750, 752, 763, 771, 196, 812, 861, and 1069. In some embodiments, the at least one gRNA includes a targeting domain that comprises a polynucleotide sequence corresponding to at least 10, 11, 12, 13, 14, 15, 16, 17, 18, 19, or 20 consecutive bases of any one of SEQ ID NOs: 685, 697, 750, 752, 763, 771, 196, 812, and 861, or a truncation, complement, and/or variation thereof. In some embodiments, the at least one gRNA is complementary to a polynucleotide sequence corresponding to at least 10, 11, 12, 13, 14, 15, 16, 17, 18, 19, or 20 consecutive bases of any one of SEQ ID NOs: 53, 55, 64, 65, 68, 70, 196, 291, or 335, or a truncation, complement, and/or variation thereof.

[0123] The protospacer sequence (also referred to as target sequence of the gRNA) and the gRNAs in TABLE 1 and TABLE 2 and TABLE 4 bind to (are complementary to) the same sequence (on the opposite strand) of the target DNA. For example, a guide RNA that corresponds to the target region identified by AAAGCATGCGCTACAATAAC (SEQ ID NO: 47) may comprise at least 18 consecutive bases of the sequence AAAGCAUGCGCUACAAUAAC (SEQ ID NO: 591).

TABLE 1
Examples of gRNAs targeting a
gene within or near the 15q11-q13 locus.

| | SEQ | | SEQ | |
|---|---|---|---|---|
| | ID | protospacer | ID | gRNA |
| gRNA name | NO | sequence | NO | sequence |
| PWS_G.3511 | 1 | CTAAGCAGTG | 1052 | CUAAGCAGUG |
| | | GACTAAGGAT | | GACUAAGGAU |
| PWS_G.3549 | 2 | CTACTTTAGA | 1122 | CUACUUUAGA |
| | | TTCTATTGTA | | UUCUAUUGUA |
| PWS_G.4662 | 3 | GCAGCTCAGA | 1054 | GCAGCUCAGA |
| | | AAGTGATGCA | | AAGUGAUGCA |
| PWS_G.4738 | 4 | GCCAGGTTAC | 1058 | GCCAGGUUAC |
| | | TGATTCATAG | | UGAUUCAUAG |
| PWS_G.4862 | 5 | GCGCACTGCA | 1057 | GCGCACUGCA |
| | | GCGCAGACCA | | GCGCAGACCA |
| PWS_G.5117 | 6 | GGAACCAGTC | 588 | GGAACCAGUC |
| | | AGAACAGGTG | | AGAACAGGUG |
| PWS_G.5706 | 7 | GGTCGGCTTC | 1051 | GGUCGGCUUC |
| | | AGGAGGGAAG | | AGGAGGGAAG |
| PWS_G.6131 | 8 | GTGGATAGGT | 1059 | GUGGAUAGGU |
| | | GCGTTCAAGG | | GCGUUCAAGG |
| PWS_G.6318 | 9 | GTTTCAGGCC | 1053 | GUUUCAGGCC |
| | | TGGACTGGGT | | UGGACUGGGU |
| PWS_G.8738 | 10 | ACAGTTCAGG | 1055 | ACAGUUCAGG |
| | | GCATGAGATA | | GCAUGAGAUA |
| PWS_G.9414 | 11 | CAGTTCAGGG | 586 | CAGUUCAGGG |
| | | CATGAGATAA | | CAUGAGAUAA |
| PWS_G.10218 | 12 | GGGCATGAGA | 1056 | GGGCAUGAGA |
| | | TAAGGGCAGT | | UAAGGGCAGU |
| PWS_G.717 | 91 | ACCCACCCAG | 581 | ACCCACCCAG |
| (pat1) | | CAACCACCAG | | CAACCACCAG |
| PWS_G.9876 | 92 | GACAATGACA | 582 | GACAAUGACA |
| (pat3) | | AGGGTTGTGG | | AGGGUUGUGG |
| PWS_G.7517 | 93 | TGCTTGTTTG | 584 | GGUUUUGAGC |
| (pat5) | | CCGCAGTGCA | | AAGCCCUCCU |
| PWS_G.7097 | 94 | TCGTTGTGAC | 586 | UCGUUGUGAC |
| (pat7) | | ACTACTGAGT | | ACUACUGAGU |
| PWS_G.3780 | 95 | CTGCCACGCT | 587 | CUGCCACGCU |
| (pat8) | | GTGACTCAGA | | GUGACUCAGA |

TABLE 2
Examples of target regions
within or near the 15q11-q13 locus.

| | SEQ | | SEQ | |
|---|---|---|---|---|
| | ID | | ID | |
| gRNA name | NO | Protospacer sequence | NO | gRNA sequence |
| PWS_G.81 | 47 | AAAGCATGCGCTACAATAAC | 591 | AAAGCAUGCGCUACAAUAAC |
| PWS_G.595 | 48 | ACAGATGCGTCAGGCATCTC | 606 | ACAGAUGCGUCAGGCAUCUC |
| PWS_G.648 | 49 | ACATCCTCTATTCTGATCAT | 585 | ACAUCCUCUAUUCUGAUCAU |
| PWS_G.1288 | 50 | AGGAGCGGTCAGTGACGCGA | 634 | AGGAGCGGUCAGUGACGCGA |
| PWS_G.1867 | 51 | ATGCCTGACGCATCTGTCTG | 657 | AUGCCUGACGCAUCUGUCUG |
| PWS_G.2532 | 52 | CATAAGCAACCTGGGATCAA | 679 | CAUAAGCAACCUGGGAUCAA |
| PWS_G.2815 | 53 | CCAGGTCATTCCGGTGAGGG | 685 | CCAGGUCAUUCCGGUGAGGG |
| PWS_G.2977 | 54 | CCCTCACCGGAATGACCTGG | 696 | CCCUCACCGGAAUGACCUGG |
| PWS_G.2979 | 55 | CCCTCAGGTCTTCCTATGTG | 697 | CCCUCAGGUCUUCCUAUGUG |
| PWS_G.3026 | 56 | CCGCACATAGGAAGACCTGA | 698 | CCGCACAUAGGAAGACCUGA |
| PWS_G.3107 | 57 | CCTATTGCGGGTGTCTGCGG | 704 | CCUAUUGCGGGUGUCUGCGG |
| PWS_G.3193 | 58 | CCTGTCGCGACACCACAGTT | 709 | CCUGUCGCGACACCACAGUU |
| PWS_G.3268 | 59 | CGAGCGGACAGGATACCATC | 712 | CGAGCGGACAGGAUACCAUC |
| PWS_G.3437 | 60 | CGGTCAGTGACGCGATGGAG | 717 | CGGUCAGUGACGCGAUGGAG |
| PWS_G.3477 | 61 | CGTGGGGGGACCAGTGCATA | 719 | CGUGGGGGGACCAGUGCAUA |
| PWS_G.3482 | 62 | CGTGTGGCGAGGGTACGTGG | 720 | CGUGUGGCGAGGGUACGUGG |
| PWS_G.3858 | 63 | CTGTCGCGACACCACAGTTG | 734 | CUGUCGCGACACCACAGUUG |
| PWS_G.4363 | 64 | GAGCGGACAGGATACCATCG | 750 | GAGCGGACAGGAUACCAUCG |
| PWS_G.4521 | 65 | GATGCGTCAGGCATCTCCGG | 752 | GAUGCGUCAGGCAUCUCCGG |
| PWS_G.4627 | 66 | GCACGCCTGCGCGGCCGCAG | 759 | GCACGCCUGCGCGGCCGCAG |
| PWS_G.4658 | 67 | GCAGCGAGTCTGGCGCAGAG | 761 | GCAGCGAGUCUGGCGCAGAG |
| PWS_G.4670 | 68 | GCAGGCTGGCGCGCATGCTC | 763 | GCAGGCUGGCGCGCAUGCUC |
| PWS_G.4871 | 69 | GCGCCCCAATGCGAGCGGAC | 770 | GCGCCCCAAUGCGAGCGGAC |
| PWS_G.4903 | 70 | GCGGCGACAGTGGGTATTGG | 771 | GCGGCGACAGUGGGUAUUGG |
| PWS_G.5274 | 71 | GGCAAACAAGCACGCCTGCG | 785 | GGCAAACAAGCACGCCUGCG |
| PWS_G.5478 | 72 | GGGACGCGCCCCAATGCGAG | 792 | GGGACGCGCCCCAAUGCGAG |
| PWS_G.5691 | 73 | GGTCAGTGACGCGATGGAGC | 798 | GGUCAGUGACGCGAUGGAGC |
| PWS_G.6001 | 74 | GTCGCGACAGGTCCTATTGC | 808 | GUCGCGACAGGUCCUAUUGC |
| PWS_G.6065 | 75 | GTGACGCGATGGAGCGGGCA | 813 | GUGACGCGAUGGAGGGGGCA |
| PWS_G.6298 | 76 | GTTGTGCCGTTCTGCCCCGA | 819 | GUUGUGCCGUUCUGCCCCGA |
| PWS_G.7011 | 77 | TCCGTGTGGCGAGGGTACGT | 847 | UCCGUGUGGCGAGGGUACGU |
| PWS_G.7296 | 78 | TGACCGAGGCGAGGAGGCTA | 858 | UGACCGAGGCGAGGAGGCUA |
| PWS_G.7302 | 79 | TGACGCATCTGTCTGAGGAG | 859 | UGACGCAUCUGUCUGAGGAG |
| PWS_G.7440 | 80 | TGCCGCTGCTGCAGCGAGTC | 862 | UGCCGCUGCUGCAGCGAGUC |
| PWS_G.7517 | 81 | TGCTTGTTTGCCGCAGTGCA | 583 | UGCUUGUUUGCCGCAGUGCA |
| PWS_G.7751 | 82 | TGTCGCGACACCACAGTTGG | 870 | UGUCGCGACACCACAGUUGG |
| PWS_G.7924 | 83 | TTAGGCGGAGGTAGGTATAT | 876 | UUAGGCGGAGGUAGGUAUAU |
| PWS_G.9680 | 84 | CTCAAATCAATCTCCCTGTA | 941 | CUCAAAUCAAUCUCCCUGUA |
| PWS_G.9721 | 85 | CTGCAATTCGTTCCTTCCAG | 943 | CUGCAAUUCGUUCCUUCCAG |
| PWS_G.10360 | 86 | GTGAGTGGAGGTTGACTAAA | 973 | GUGAGUGGAGGUUGACUAAA |

[0124] TABLE 3 identifies the regions of DNA targeted in paternal screens (CRISPRi screens) with a repressor in which gRNA hits were enriched relative to other targeted DNA regions (pat1-pat8), and the regions of DNA targeted in maternal screens (CRISPRa screens) with an activator or demethylase in which gRNA hits were enriched relative to other targeted DNA regions (mat1-mat2 or mat3-mat4, respectively). Guide RNAs within two regions, pat6 and pat8, increased observed levels of SNRPN expression when paired with a Cas9-repressor protein. Guide RNAs within four regions, mat1-mat4, increased observed levels of SNRPN expression when paired with an activator or epigenetic modifier protein.

TABLE 3
Regions of DNA targeted in paternal and maternal screens.

| | | | | | | SNRPN |
|---|---|---|---|---|---|---|
| | | | | | Chr. coordinate | coordinate of |
| | | SEQ | Starting | Ending | of example | example |
| | Chromosomal | ID | SNRPN | SNRPN | validated single | validated single |
| Region | coordinates | NO: | coordinate | coordinate | gRNA | gRNA |
| pat1 | chr15: 25099211- | 1123 | −100858 | −94723 | 25101568 | −98501 |
| | 25105346 | | | | | |
| pat2 | chr15: 25142337- | 1124 | −57732 | −52414 | | |
| | 25147655 | | | | | |
| pat3 | chr15: 25195722- | 1125 | −4347 | −3547 | 25196467 | −3602 |
| | 25196522 | | | | | |
| pat4 | chr15: 25198794- | 1126 | −1275 | +1921 | 25200029 | −40 |
| | 25201990 | | | | | |
| pat5 | chr15: 25203015- | 1127 | +2720 | +23516 | 25211664 | 11595 |
| | 25223585 | | | | | |
| pat6 | chr15: 25223912- | 1128 | +23843 | +24582 | 25224155 | 24086 |
| | 25224651 | | | | | |
| pat7 | chr15: 25224909- | 1129 | +24840 | +35218 | 25227019 | 26950 |
| | 25235287 | | | | | |
| pat8 | chr15: 25235775- | 1130 | +35706 | +36168 | 25235867 | 35798 |
| | 25236237 | | | | | |
| mat1 | chr15: 25074022- | 1131 | −126047 | −125228 | 25074809 | −125260 |
| | 25074874 | | | | | |
| mat1-A | chr15: 25068632- | 1132 | −131437 | −131080 | | |
| | 25068989 | | | | | |
| mat1-B | chr15: 25071154- | 1133 | −128915 | −128215 | | |
| | 25071854 | | | | | |
| mat1-C | chr15: 25076771- | 1134 | −124298 | −122940 | | |
| | 25077129 | | | | | |
| mat2 | chr15: 25108001- | 1135 | −92068 | −91960 | 25108002 | −92067 |
| | 25108109 | | | | | |
| mat3 | chr15: 25199722- | 1136 | −347 | +876 | | |
| | 25200915 | | | | | |
| mat4 | chr15: 25213427- | 1137 | +13358 | +13526 | | |
| | 25213595 | | | | | |

TABLE 4
Examples of regions of DNA targeted in a demethylase screen.

| | | | relative | |
|---|---|---|---|---|
| | | | position | |
| | | | to SNRPN | |
| | | | exon 1 | |
| | | | start | |
| gRNA name | Protospacer sequence | chr15 | (25200069) | gRNA sequence |
| PWS_G.2979 | CCCTCAGGTCTTCCTATGTG | 25199775 | −294 | CCCUCAGGUCUUCCUAUGUG |
| | (SEQ ID NO: 55) | | | (SEQ ID NO: 697) |
| PWS_G.4670 | GCAGGCTGGCGCGCATGCTC | 25200068 | −1 | GCAGGCUGGCGCGCAUGCUC |
| | (SEQ ID NO: 68) | | | (SEQ ID NO: 763) |
| PWS_G.4521 | GATGCGTCAGGCATCTCCGG | 25200151 | 82 | GAUGCGUCAGGCAUCUCCGG |
| | (SEQ ID NO: 65) | | | (SEQ ID NO: 752) |
| PWS_G.4363 | GAGCGGACAGGATACCATCG | 25200391 | 322 | GAGCGGACAGGAUACCAUCG |
| | (SEQ ID NO: 64) | | | (SEQ ID NO: 750) |
| PWS_G.4903 | GCGGCGACAGTGGGTATTGG | 25200896 | 827 | GCGGCGACAGUGGGUAUUGG |
| | (SEQ ID NO: 70) | | | (SEQ ID NO: 771) |
| PWS_G.81 | AAAGCATGCGCTACAATAAC | 25213427 | 13358 | AAAGCAUGCGCUACAAUAAC |
| | (SEQ ID NO: 47) | | | (SEQ ID NO: 591) |
| PWS_G.648 | ACATCCTCTATTCTGATCAT | 25224155 | 24086 | ACAUCCUCUAUUCUGAUCAU |
| | (SEQ ID NO: 49) | | | (SEQ ID NO: 585) |
| PWS_G.306 | AAGCAATATGAAATGTTACC | 25068970 | −131099 | AAGCAAUAUGAAAUGUUACC |
| | (SEQ ID NO: 528) | | | (SEQ ID NO: 1069) |
| PWS_G.6064 | GTGACGCAACACAGACCCCC | 25201415 | 1346 | GUGACGCAACACAGACCCCC |
| | (SEQ ID NO: 291) | | | (SEQ ID NO: 812) |
| PWS_G.2815 | CCAGGTCATTCCGGTGAGGG | 25199993 | −76 | CCAGGUCAUUCCGGUGAGGG |
| | (SEQ ID NO: 53) | | | (SEQ ID NO: 685) |
| PWS_G.7410 | TGCATAGGGATTTTAGGCGG | 25200602 | 533 | UGCAUAGGGAUUUUAGGCGG |
| | (SEQ ID NO: 335) | | | (SEQ ID NO: 861) |
| PWS_G.3052 | CCGGACAGCGACAGGCCCCG | 25201020 | 951 | CCGGACAGCGACAGGCCCCG |
| | (SEQ ID NO: 196) | | | (SEQ ID NO: 196) |

[0125] Additional examples of gRNAs are shown in TABLE. The gRNA may be encoded by a polynucleotide comprising a sequence selected from SEQ ID NOs: 1148-1156 or a truncation, complement, and/or variation thereof, or bind to a polynucleotide comprising a sequence selected from SEQ ID NOs: 1148-1156 or a truncation, complement, and/or variation thereof, or comprise a sequence selected from SEQ ID NOs: 1157-1165 or a truncation, complement, and/or variation thereof.

TABLE 5
Targeting portion of
gRNAs targeting the 15q11-13 locus.

| gRNA (DNA) | gRNA (RNA) |
|---|---|
| GAGCGGACAGGATACCATCG | GAGCGGACAGGAUACCAUCG |
| (SEQ ID NO: 1148) | (SEQ ID NO: 1157) |
| TGCATAGGGATTTTAGGCGG | UGCAUAGGGAUUUUAGGCGG |
| (SEQ ID NO: 1149) | (SEQ ID NO: 1158) |
| GCCAGGTCATTCCGGTGAGGG | GCCAGGUCAUUCCGGUGAGGG |
| (SEQ ID NO: 1150) | (SEQ ID NO: 1159) |
| GCCCTCAGGTCTTCCTATGTG | GCCCUCAGGUCUUCCUAUGUG |
| (SEQ ID NO: 1151) | (SEQ ID NO: 1160) |
| GCCGGACAGCGACAGGCCCCG | GCCGGACAGCGACAGGCCCCG |
| (SEQ ID NO: 1152) | (SEQ ID NO: 1161) |
| GGATGCGTCAGGCATCTCCGG | GGAUGCGUCAGGCAUCUCCGG |
| (SEQ ID NO: 1153) | (SEQ ID NO: 1162) |
| GGCAGGCTGGCGCGCATGCTC | GGCAGGCUGGCGCGCAUGCUC |
| (SEQ ID NO: 1154) | (SEQ ID NO: 1163) |
| GGCGGCGACAGTGGGTATTGG | GGCGGCGACAGUGGGUAUUGG |
| (SEQ ID NO: 1155) | (SEQ ID NO: 1164) |
| GGTGACGCAACACAGACCCCC | GGUGACGCAACACAGACCCCC |
| (SEQ ID NO: 1156) | (SEQ ID NO: 1165) |

[0126] Single or multiplexed gRNAs can be designed to restore expression of imprinted genes within the 15q11-13 locus. Following treatment with a construct or system as detailed herein, expression of imprinted genes within the 15q11-13 locus can be restored in PWVS patient cells ex vivo. Genetically corrected patient cells may be transplanted into a subject.

i) Dead gRNAs

[0127] It has been reported that “dead” guide RNA can be used to guide catalytically active Cas9 to activate transcription without cleaving DNA. Dead guide RNA can be prepared by reducing the length of the DNA-targeting domain to 14-15 nucleotides (nt), and by adding MS2 binding loops into the sgRNA backbone. Guides having a DNA-targeting domain of from 20 bases to 16 bases resulted in indel formation (indicating DNA cleavage), whereas shorter guides (11 bases to 15 bases) did not show detectable levels of indel formation and were able to increase gene expression by as much as 10,000 fold (Dahlman et al., “Orthogonal gene knockout and activation with a catalytically active Cas9 nuclease,” Nat. Biotechnol. 2015, 33, 1159-1 161; correction in Nat. Biotechnol. 2016, 34, 441, each incorporated herein by reference).

[0128] Thus, the disclosure contemplates administering a Cas polypeptide with dead guide RNA comprising a DNA-targeting domain about 11-15, or 14-15 bases in length, or a DNA-targeting domain complementary to about 11-15 or 14-15 bases of the target region of the target DNA. The guide RNA may comprise mismatches at the 5′ end of the DNA-targeting domain.

[0129] One example system utilizes dead guide RNAs (comprising 14 or 15 bases of DNA-targeting domain) in conjunction with an engineered hairpin aptamer that contains two MS2 domains, which can recruit the MS2:P65:HSF1 (MPH) transcriptional activation complex to the target locus (Liao et al., Cell 2017, 171, 1495-1507, incorporated by reference).

ii) Modifications to gRNA

[0130] The activity, stability, or other characteristics of gRNAs can be altered through the incorporation of certain modifications. As one example, transiently expressed or delivered nucleic acids can be prone to degradation by, such as, cellular nucleases. Accordingly, the gRNAs described herein can contain one or more modified nucleosides or nucleotides which introduce stability toward nucleases. In addition, certain modified gRNAs described herein can exhibit a reduced innate immune response when introduced into cells. Such modifications include, without limitation, (a) alteration of the backbone linkage, such as, replacement, of one or both of the non-linking phosphate oxygens and/or of one or more of the linking phosphate oxygens in the phosphodiester backbone linkage; (b) alteration, such as, replacement, of the sugar, or a constituent of the ribose sugar, such as, of the 2′ hydroxyl on the ribose sugar; (c) replacement of the phosphate moiety with “dephospho” linkers; (d) modification or replacement of a naturally occurring nucleobase; (e) replacement or modification of the ribose-phosphate backbone; (f) modification of the 3′ end or 5′ end of the oligonucleotide, such as, removal, modification or replacement of a terminal phosphate group, capping, or conjugation of a moiety, and any combinations thereof. For example, a modified guide RNA may comprise one or more modified sugars and one or more modified backbone linkage. In other embodiments, a modified guide RNA may comprise one or more modified sugars and one or more modified nucleobases. Modifications, such as base, sugar or backbone linkages discussed in this section, can be included at every position or just some positions within a gRNA sequence including, without limitation at or near the 5′ end (such as, within 1-10, 1-5, 1-4, 1-3, or 1-2 nucleotides of the 5′ end) and/or at or near the 3′ end (such as, within 1-10, 1-5, 1-4, 1-3, or 1-2 nucleotides of the 3′ end). For example, three positions at the 5′ end and three positions at the 3′ end may be modified. In some cases, modifications are positioned within functional motifs, such as the repeat-anti-repeat duplex of a Cas9 gRNA, a stem loop structure of a Cas9 or Cpfl gRNA, and/or a targeting domain of a gRNA.

[0131] As one example, the 5′ end of a gRNA can include a eukaryotic mRNA cap structure or cap analog (such as, a G(5)ppp(5′)G cap analog, a m7G(5)ppp(5)G cap analog, or a 3′-O-Me-m7G(5)ppp(5′)G anti reverse cap analog (ARCA)). The 5′ end of the gRNA can lack a 5′ triphosphate. The 3′ terminal U ribose can be modified by oxidizing the two terminal hydroxyl groups of the U ribose to aldehyde groups with a concomitant opening of the ribose ring to afford a modified nucleoside. The 3′terminal U ribose can be modified with a 2′3′ cyclic phosphate.

[0132] Guide RNAs can contain modified nucleotides such as modified uridines, such as, 5-(2-amino)propyl uridine, and 5-bromo uridine, modified adenosines and guanosines, such as, with modifications at the 8-position, such as, 8-bromo guanosine, a deaza nucleotide, such as, 7-deaza-adenosine, or O- and N-alkylated nucleotides, such as, N6-methyl adenosine, or a modified nucleotide which is multicyclic (such as, tricyclo; and “unlocked” forms, such as glycol nucleic acid (GNA) (such as, R-GNA or S-GNA, where ribose is replaced by glycol units attached to phosphodiester bonds), orthreose nucleic acid (TNA, where ribose is replaced with α-L-threofuranosyl-(3′→2)). In example embodiments, one or more or all of the nucleotides in a gRNA are deoxynucleotides. In such embodiments, guide RNAs that comprise RNA-DNA-combinations are still referred to as guide RNA.

[0133] Sugar-modified ribonucleotides can be incorporated into the gRNA, such as, wherein the 2′ OH-group is replaced by another group. Example groups include H, —OR, —R (wherein R can be, such as, alkyl, cycloalkyl, aryl, aralkyl, heteroaryl or sugar), halo, —F, —Br, —Cl or —I, —SH, —SR (wherein R can be, such as, alkyl, cycloalkyl, aryl, aralkyl, heteroaryl or sugar), -arabino, F-arabino, amino (wherein amino can be, such as, NH2; alkylamino, dialkylamino, heterocyclyl, arylamino, diarylamino, heteroarylamino, diheteroarylamino, or amino acid); or cyano (—CN). One or more of the nucleotides of the gRNA can each independently be a modified or unmodified nucleotide including, but not limited to 2′-sugar modified, such as, 2′-O-methyl, 2′-O-methoxyethyl, or 2′-Fluoro modified including, such as, 2′-F or 2′-O-methyl, adenosine (A), 2′-F or 2′-O-methyl, cytidine (C), 2′-F or 2′-O-methyl, uridine (U), 2′-F or 2′-O-methyl, thymidine (T), 2′-F or 2′-O-methyl, guanosine (G), 2′-O-methoxyethyl-5-methyluridine (Teo), 2′-O-methoxyethyladenosine (Aeo), 2-O-methoxyethyl-5-methylcytidine (m5Ceo), and any combinations thereof. Although the majority of sugar analog alterations are localized to the 2′ position, other sites are amenable to modification, including the 4′ position. In certain embodiments, a gRNA comprises a 4′-S, 4′-Se or a 4′-C-aminomethyl-2′-O-Me modification.

[0134] The phosphate backbone can be modified, such as, with a phosphothioate (PhTx) group or phosphonoacetate, thiophosphonoacetate, methylphosphonate, boranophosphate, or phosphorodithioate.

[0135] Guide RNAs can also include “locked” nucleic acids (LNA) in which the 2′ OH-group can be connected, such as, by a C1-8 alkylene or C1-6 heteroalkylene bridge, to the 4′ carbon of the same ribose sugar. Any suitable moiety can be used to provide such bridges, include without limitation methylene, propylene, ether, or amino bridges; O-amino (wherein amino can be, such as, NH2; alkylamino, dialkylamino, heterocyclyl, arylamino, diarylamino, heteroarylamino, or diheteroarylamino, ethylenediamine, or polyamino) and aminoalkoxy or O(CH2)n-amino (wherein amino can be, such as, NH2; alkylamino, dialkylamino, heterocyclyl, arylamino, diarylamino, heteroarylamino, or diheteroarylamino, ethylenediamine, or polyamino).

[0136] As one example, gRNA having 2′-O-methyl (M) incorporated at three terminal nucleotides at both the 5′ and 3′ ends, generally exhibits improved stability against nucleases and also improved base pairing thermostability. As another example, gRNA having 2′-O-methyl-3′-phosphorothioate (MS) or 2′-O-methyl-3′-thioPACE (MSP) incorporated at three terminal nucleotides at both the 5′ and 3′ ends exhibits improved stability against nucleases.

### 5. ZINC FINGER (ZF)-BASED SYSTEMS

[0137] A DNA targeting system, such as a Targeted Activator System or Targeted Repressor System, can comprise a zinc finger (ZF)-based system.

[0138] By a “zinc finger DNA binding domain” or “ZFBD” it is meant a polypeptide domain that binds DNA in a sequence-specific manner through one or more zinc fingers. A zinc finger is a domain of about 30 amino acids within the zinc finger binding domain whose structure is stabilized through coordination of a zinc ion. Examples of zinc fingers include, but are not limited to, C2H2 zinc fingers, C3H zinc fingers, and C4 zinc fingers. Each finger typically contacts and selectively binds to three base pairs of DNA. Combining different zinc fingers together allows production of sequence-specific ZFBD. A “designed” zinc finger domain is a domain not occurring in nature whose design/composition results principally from rational criteria, such as, application of substitution rules and computerized algorithms for processing information in a database storing information of existing ZFP designs and binding data. See, for example, Kim and Kini, “Engineering and Application of Zinc Finger Proteins and TALEs for Biomedical Research,” Mot. Cells 2017, 40, 533-541; U.S. Pat. Nos. 6,140,081; 6,453,242; and 6,534,261; see also WO 98/53058; WO 98/53059; WO 98/53060; WO 02/016536 and WO03/016496, each incorporated herein by reference. A “selected” zinc finger domain is a domain not found in nature whose production results primarily from an empirical process such as phage display, interaction trap or hybrid selection. ZFBD can be fused to a nuclease, such as the Fokl nuclease, to form a zinc finger nuclease (ZFN). ZFBD can also be fused to an activator or repressor.

[0139] Thus, a ZF-Based System may comprise a ZFN or a fusion protein comprising (a) a ZF targeting a target region, or a variant thereof, and (b) an activator, or a variant thereof. A ZF-Based System may comprise a fusion protein comprising (a) a ZF targeting a target region, or a variant thereof and (b) a repressor, or a variant thereof. Alternatively, the ZF can be linked to the activator or repressor through reversible or irreversible covalent linkage or through a non-covalent linkage.

### 6. TRANSCRIPTION ACTIVATOR-LIKE EFFECTOR (TALE)-BASED SYSTEMS

[0140] A DNA targeting system, such as a Targeted Activator System or Targeted Repressor System, can comprise a transcription activator-like effector-(TALE)-based system.

[0141] A TALE is a “transcription activator-like effector DNA binding domain,” “TAL effector DNA binding domain,” or “TALE DNA binding domain” that is the polypeptide domain of TAL effector proteins that is responsible for binding of the TAL effector protein to DNA. TAL effector proteins are secreted by plant pathogens of the genus Xanthomonas during infection. These proteins enter the nucleus of the plant cell, bind effector-specific DNA sequences via their DNA binding domain, and activate gene transcription at these sequences via their transactivation domains. TAL effector DNA binding domain specificity depends on modules consisting of repetitive sequences of 33-35 amino acid repeats, which comprise polymorphisms at select repeat positions, usually the 12th and 13th position, called repeat variable-diresidues (RVD). These RVD may determine the nucleotide specificity of each module. Combining these modules allows production of sequence-specific TALEs. TALEs are described in greater detail, for example, in U.S. Patent Application No. 2011/0145940, Kim and Kini (Mol. Cells 2017, 40, 533-541), and Moore et al. (ACS Synth Biol. 2014, 3, 708-716), each incorporated herein by reference. A TALE can be fused to a nuclease, such as the FokI nuclease, to form a TALE nuclease (TALEN). A TALE can also be fused to an activator or repressor.

[0142] Thus, a TALE-Based System may comprise a TALEN or a fusion protein comprising (a) a TALE targeting a target region, or a variant thereof and (b) an activator, or a variant thereof. A TALE-Based System may comprise a fusion protein comprising (a) a TALE targeting a target region, or a variant thereof and (b) a repressor, or a variant thereof. Alternatively, the TALE can be linked to the activator or repressor through reversible or irreversible covalent linkage or through a non-covalent linkage.

### 7. FUSION PROTEIN

[0143] Polypeptides may be linked to a second polypeptide domain such as, for example, an activator or repressor, to form a fusion protein. The fusion protein can comprise two heterologous polypeptide domains. The first polypeptide domain comprises a DNA-binding protein such as a ZFBD, TALE, or Cas polypeptide, as detailed above. The first polypeptide domain is fused to at least one second polypeptide domain. The second heterologous polypeptide domain may have an activity such as transcription activation activity, transcription repression activity, transcription release factor activity, histone modification activity, nuclease activity, nucleic acid association activity, methylase activity, demethylase activity, acetylation activity, or deacetylation activity.

[0144] The linkage to the second polypeptide domain can be through reversible or irreversible covalent linkage or through a non-covalent linkage, as long as the linker does not interfere with the function of the second polypeptide domain. For example, a ZFBD, TALE or Cas polypeptide can be linked to a second polypeptide domain as part of a fusion protein. As another example, they can be linked through reversible non-covalent interactions such as avidin (or streptavidin)-biotin interaction, histidine-divalent metal ion interaction (such as, Ni, Co, Cu, Fe), interactions between multimerization (such as, dimerization) domains, or glutathione S-transferase (GST)-glutathione interaction. As yet another example, they can be linked covalently but reversibly with linkers such as dibromomaleimide (DBM) or amino-thiol conjugation.

[0145] The second polypeptide domain may be at the C-terminal end of the first polypeptide domain, or at the N-terminal end of the first polypeptide domain, or a combination thereof. The fusion protein may include one second polypeptide domain, or two of the second polypeptide domains. For example, the fusion protein may include a second polypeptide domain at the N-terminal end as well as a second polypeptide domain at the C-terminal end of the first polypeptide domain. The two second polypeptide domains may be the same or different. In other embodiments, the fusion protein may include more than one (for example, two or three) second polypeptide domains in tandem.

[0146] In example embodiments, a fusion protein comprising (a) nuclease-active Cas9, a nuclease null Cas9 (dCas9), or a ZFBD, or a TALE linked to (b) an activator or repressor can be used to modulate gene expression (see examples of activators or repressors below). The fusion proteins optionally include a linker between the dCas9 (or ZF DNA-binding domain or TALE DNA-binding domain) and the activator or repressor. Suitable linkers include short stretches of amino acids (such as 2-20 amino acids) and are typically flexible (i.e. comprising amino acids with high degree of freedom such as glycine, alanine and serine). In example embodiments, the linker comprises one or more units consisting of GGGS or GGGGS, such as two, three, four or more repeats of the GGGS or GGGGS unit. Other linker sequences known in the art can also be used.

[0147] In some embodiments, the fusion protein includes a Cas9 protein or a mutated Cas9 protein, fused to a second polypeptide domain that has an activity such as transcription activation activity, transcription repression activity, transcription release factor activity, histone modification activity, nuclease activity, nucleic acid association activity, methylase activity, demethylase activity, acetylation activity, or deacetylation activity.

a. Transcription Activation Activity

[0148] The second polypeptide domain can have transcription activation activity, i.e., a transactivation domain. For example, gene expression of endogenous mammalian genes, such as human genes, can be achieved by targeting a fusion protein of dCas9 and a transactivation domain to mammalian promoters via combinations of gRNAs. The transactivation domain can include a VP 16 protein, multiple VP 16 proteins, such as a VP48 domain or VP64 domain, or p65 domain of NF kappa B transcription activator activity. For example, the fusion protein may be dCas9-VP64. In some embodiments, the fusion protein may be VP64-dCas9-VP64 (SEQ ID NO: 43 or a polypeptide at least 70%, 75%, 80%, 85%, 90%, 95%, 96%, 97%, 98%, or at least 99% identical thereto, encoded by the polynucleotide of SEQ ID NO: 44 or a polynucleotide at least 70%, 75%, 80%, 85%, 90%, 95%, 96%, 97%, 98%, or at least 99% identical thereto). A transcription activation domain may include p300, such as p300-core. A fusion protein that activates transcription may also include dCas9-p300, such as the polypeptide of SEQ ID NO: 45 or SEQ ID NO: 46, or a polypeptide at least 70%, 75%, 80%, 85%, 90%, 95%, 96%, 97%, 98%, or at least 99% identical thereto.

[0149] Non-limiting examples of activators may include: VP64, VP16; GAL4; p65 subdomain (NFkB); KMT2 family transcriptional activators: hSET1A, hSET1B, MLL1 to 5, ASH1, and homologs (Trx, Trr, Ash1); KMT3 family: SYMD2, NSD1; KMT4 family: DOT1L and homologs; KDM1: LSD1/BHC110 and homologs (SpLsd1/Swm1/Saf110, Su(var)3-3); KDM3 family: JHDM2a/b; KDM4 family: JMJD2A/JHDM3A, JMJD2B, JMJD2C/GASC1, JMJD2D, and homologs (Rph1); KDM6 family: UTX, JMJD3, VP64-p65-Rta (VPR); synergistic action mediator (SAM); p300; VP160; VP64-dCas9-BFP-VP64; KAT2 family: hGCN5, PCAF, and homologs (dGCN5/PCAF, Gcn5; KAT3 family: CBP, p300 and homologs (dCBP/NEJ); KAT4: TAF1 and homologs (dTAF1); KAT5: TIP60/PLIP, and homologs; KAT6: MOZ/MYST3, MORF/MYST4, and homologs (Mst2, Sas3, CG1894); KAT7: HBO1/MYST2, and homologs (CHM, Mst2); KAT8: HMOF/MYST1, and homologs (dMOF, CG1894, Sas2, Mst2): KAT13 family: SRC1, ACTR, P160, CLOCK, and homologs; AID/Apobed deaminase family: AID; TET dioxygenase family: TET1; DEMETER glycosylase family: DME, DML1, DML2, or ROS1.

[0150] In some embodiments, the second polypeptide domain comprises Tet1 or a variant thereof. One variant of Tet1 is known as Tet1CD or Tet1c (Ten-eleven translocation methylcytosine dioxygenase 1; polynucleotide sequence SEQ ID NO: 1138: amino acid sequence SEQ ID NO: 1139). Another variant of Tet1 is known as Tetv4. Tetv4 is detailed in, for example, Nuflez et al. Cell 2021, 184, 2503-2519, incorporated herein by reference. In some embodiments, the second polypeptide domain comprises Tet1, Tet1c, or Tet1v4. Tet1c may comprise a polypeptide having an amino acid sequence of SEQ ID NO: 1139, encoded by a polynucleotide comprising the sequence of SEQ ID NO: 1138, or a polypeptide or polynucleotide at least 70%, 75%, 80%, 85%, 90%, 95%, 96%, 97%, 98%, or at least 99% identical thereto. Tet1v4 may comprise a polypeptide having an amino acid sequence of SEQ ID NO: 1166, encoded by a polynucleotide comprising the sequence of SEQ ID NO: 1167, or a polypeptide or a polynucleotide at least 70%, 75%, 80%, 85%, 90%, 95%, 96%, 97%, 98%, or at least 99% identical thereto. A Tet1c-dCas9 fusion protein may comprise a polypeptide having an amino acid sequence of SEQ ID NO: 1168 or 1172, encoded by a polynucleotide comprising the sequence of SEQ ID NO: 1169 or 1173, respectively, or a polypeptide or a polynucleotide at least 70%, 75%, 80%, 85%, 90%, 95%, 96%, 97%, 98%, or at least 99% identical thereto. A Tet1v4-dCas9 fusion protein may comprise a polypeptide having an amino acid sequence of SEQ ID NO: 1170 or 1174, encoded by a polynucleotide comprising the sequence of SEQ ID NO: 1171 or 1175, respectively, or a polypeptide or a polynucleotide at least 70%, 75%, 80%, 85%, 90%, 95%, 96%, 97%, 98%, or at least 99% identical thereto.

b. Transcription Repression Activity

[0151] The second polypeptide domain can have transcription repression activity. The second polypeptide domain can have a Kruppel associated box activity, such as a KRAB domain, ERF repressor domain activity, MxII repressor domain activity, SID4X repressor domain activity, Mad-SID repressor domain activity, or TATA box binding protein activity. For example, the fusion protein may be dCas9-KRAB (polynucleotide sequence SEQ ID NO: 87; protein sequence SEQ ID NO: 88). KRAB may comprise a polypeptide having the amino acid sequence of SEQ ID NO: 1176, encoded by a polynucleotide comprising the sequence of SEQ ID NO: 1177, or a polypeptide or a polynucleotide at least 70%, 75%, 80%, 85%, 90%, 95%, 96%, 97%, 98%, or at least 99% identical thereto.

[0152] Non-limiting examples of repressors may include: KRAB, Mad mSIN3 interaction domain (SID); the ERF repressor domain (ERD); KMT1 family: SUV39H1, SUV39H2, G9A, ESET/SETBD1, and homologs (Cir4, Su(var)3-9); KMT5 family: Pr-SET7/8, SUV4-20H1, and homologs (PR-set7, Suv4-20, and Set9); KMT6: EZH2, KMT8: RIZ1, KDM4 family: JMJD2A/JHDM3A, JMJD2B, JMJ2D2C/GASC1, JMJD2D, and homologs (Rph1); KDM5 family JARID1A/RBP2, JARIDIB/PLU-1, JARIDIC/SMCX, JARID1D/SMCY, and homologs (Lid, Jhn2, Jmj2); HDAC1, HDAC2, HDAC3, HDAC8, and its homologs (Rpd3, Hos1, Cir6); HDAC4, HDAC5, HDAC7, HDAC9, and its homologs (Hdal, Cir3); SIRT1, SIRT2, and its homologs (Sir2, Hst1, Hst2, Hst3, and Hst4); HDAC11, DNMT1, DNMT3a/3b, MET1, DRM3, and homologs, ZMET2, CMT1, CMT2, Laminin A, Laminin B, or CTCF.

c. Transcription Release Factor Activity

[0153] The second polypeptide domain can have transcription release factor activity. The second polypeptide domain can have eukaryotic release factor 1 (ERF1) activity or eukaryotic release factor 3 (ERF3) activity.

d. Histone Modification Activity

[0154] The second polypeptide domain can have histone modification activity. The second polypeptide domain can have histone deacetylase, histone acetyltransferase, histone demethylase, or histone methyltransferase activity. The histone acetyltransferase may be p300 or CREB-binding protein (CBP) protein, or fragments thereof, such as p300-core. For example, the fusion protein may be dCas9-p300.

e. Nuclease Activity

[0155] The second polypeptide domain can have nuclease activity that is different from the nuclease activity of the Cas9 protein. A nuclease, or a protein having nuclease activity, is an enzyme capable of cleaving the phosphodiester bonds between the nucleotide subunits of nucleic acids. Nucleases are usually further divided into endonucleases and exonucleases, although some of the enzymes may fall in both categories. Well known nucleases include deoxyribonuclease and ribonuclease.

f. Nucleic Acid Association Activity

[0156] The second polypeptide domain can have nucleic acid association activity or nucleic acid binding protein-DNA-binding domain (DBD). A DBD is an independently folded protein domain that contains at least one motif that recognizes double- or single-stranded DNA. A DBD can recognize a specific DNA sequence (a recognition sequence) or have a general affinity to DNA. A nucleic acid association region may be selected from helix-turn-helix region, leucine zipper region, winged helix region, winged helix-turn-helix region, helix-loop-helix region, immunoglobulin fold, B3 domain, Zinc finger, HMG-box, Wor3 domain, TAL effector DNA-binding domain.

g. Methylase Activity

[0157] The second polypeptide domain can have methylase activity, which involves transferring a methyl group to DNA, RNA, protein, small molecule, cytosine or adenine. In some embodiments, the second polypeptide domain includes a DNA methyltransferase.

h. Demethylase Activity

[0158] The second polypeptide domain can have demethylase activity. The second polypeptide domain can include an enzyme that removes methyl (CH3-) groups from nucleic acids, proteins (in particular histones), and other molecules. Alternatively, the second polypeptide can convert the methyl group to hydroxymethylcytosine in a mechanism for demethylating DNA. The second polypeptide can catalyze this reaction. For example, the second polypeptide that catalyzes this reaction can be Tet1. In some embodiments, the second polypeptide domain comprises Tet1 or a variant thereof. One variant of Tet1 is known as Tet1CD or Tet1c (Ten-eleven translocation methylcytosine dioxygenase 1; polynucleotide sequence SEQ ID NO: 1138; amino acid sequence SEQ ID NO: 1139). Another variant of Tet1 is known as Tetv4. Tetv4 is detailed in, for example, Nunez et al. Cell 2021, 184, 2503-2519, incorporated herein by reference. In some embodiments, the second polypeptide domain comprises Tet1, Tet1c, or Tet1v4. Tet1c may comprise a polypeptide having an amino acid sequence of SEQ ID NO: 1139, encoded by a polynucleotide comprising the sequence of SEQ ID NO: 1138, or a polypeptide or polynucleotide at least 70%, 75%, 80%, 85%, 90%, 95%, 96%, 97%, 98%, or at least 99% identical thereto. Tet1v4 may comprise a polypeptide having an amino acid sequence of SEQ ID NO: 1166, encoded by a polynucleotide comprising the sequence of SEQ ID NO: 1167, or a polypeptide or a polynucleotide at least 70%, 75%, 80%, 85%, 90%, 95%, 96%, 97%, 98%, or at least 99% identical thereto. A Tet1c-dCas9 fusion protein may comprise a polypeptide having an amino acid sequence of SEQ ID NO: 1168 or 1172, encoded by a polynucleotide comprising the sequence of SEQ ID NO: 1169 or 1173, respectively, or a polypeptide or a polynucleotide at least 70%, 75%, 80%, 85%, 90%, 95%, 96%, 97%, 98%, or at least 99% identical thereto. A Tet1v4-dCas9 fusion protein may comprise a polypeptide having an amino acid sequence of SEQ ID NO: 1170 or 1174, encoded by a polynucleotide comprising the sequence of SEQ ID NO: 1171 or 1175, respectively, or a polypeptide or a polynucleotide at least 70%, 75%, 80%, 85%, 90%, 95%, 96%, 97%, 98%, or at least 99% identical thereto.

i. Regulation of Gene Expression Using Cas Polypeptides Alone

[0159] A Targeted Activator System or Targeted Repressor System can comprise a Cas polypeptide alone, not linked to an activator or repressor. Catalytically active Cas polypeptides or nuclease null Cas polypeptides can be administered with a dead guide RNA to activate gene expression as described above. Cas polypeptides with reduced nuclease activity can also be administered with normal guide RNA to repress gene expression as described in Qi et al. Cell 2013, 152, 1173-1183, incorporated herein by reference.

### 8. REPAIR PATHWAYS

[0160] The DNA Targeting System may target a regulatory element of a gene in the PWS-associated locus and alter its activity by introducing a mutation in the regulatory element. In some embodiments, the at least one gRNA targets an inhibitory regulatory element of a gene within the 15q11-13 locus. In such embodiments, the gRNA may be combined with a Cas9 protein that introduces a mutation in the regulatory element such as an insertion, deletion and/or substitution, such that activity of the inhibitory regulatory element is decreased, thereby activating expression of the gene within the 15q11-13 locus for the treatment of PWS. In other embodiments, the at least one gRNA targets an activating regulatory element of a gene within the 15q11-13 locus. In such embodiments, the gRNA may be combined with a Cas9 protein that introduces a mutation in the regulatory element such as an insertion, deletion and/or substitution, such that activity of the activating regulatory element is increased, thereby activating expression of the gene within the 15q11-13 locus for the treatment of PWS.

[0161] A nuclease system, such as a CRISPR/Cas9-based gene editing system, may be used to introduce site-specific single or double strand breaks at targeted regions of genomic loci, such as a regulatory element of a gene within the 15q11-13 locus. Site-specific breaks are created when any of the nuclease-based gene editing systems described herein binds to a target DNA sequences, thereby permitting cleavage of the target DNA. This DNA cleavage may stimulate the natural DNA-repair machinery, leading to one of two possible repair pathways: homology-directed repair (HDR) or the non-homologous end joining (NHEJ) pathway.

a. Homology-Directed Repair (HDR)

[0162] Restoration of protein expression from a gene within the 15q11-13 locus may involve homology-directed repair. A donor template may be administered to a cell that has been treated with a nuclease system to induce a single- or double-stranded DNA break. The donor template may include a nucleotide sequence encoding a mutated version of a regulatory element (an inhibitory regulatory element or an activating regulatory element) of a gene within the 15q11-13 locus. Mutations may include, for example, nucleotide substitutions, insertions, deletions, or a combination thereof. For example, introduced mutation(s) into the inhibitory regulatory element of a gene within the 15q11-13 locus may reduce the transcription of or binding to the inhibitory regulatory element, thereby activating expression of the gene within the 15q11-13 locus for the treatment of PWS.

b. Non-Homologous End Joining (NHEJ)

[0163] Restoration of protein expression from a gene within the 15q11-13 locus may be through template-free NHEJ-mediated DNA repair. In certain embodiments, NHEJ is a nuclease mediated NHEJ, which in certain embodiments, refers to NHEJ that is initiated by a Cas9 protein that cuts double stranded DNA. The method comprises administering a nuclease system disclosed herein, such as a CRISPR/Cas9-based gene editing system, or a composition comprising thereof to a subject for genome editing.

[0164] Nuclease mediated NHEJ may mutate a regulatory element (an inhibitory regulatory element or an activating regulatory element) of a gene within the 15q11-13 locus. Nuclease mediated NHEJ may offer several potential advantages over the HDR pathway. For example, NHEJ does not require a donor template, which may cause nonspecific insertional mutagenesis. In contrast to HDR, NHEJ operates efficiently in all stages of the cell cycle and therefore may be effectively exploited in both cycling and post-mitotic cells, such as muscle fibers. This provides a robust, permanent gene restoration alternative to oligonucleotide-based exon skipping or pharmacologic forced read-through of stop codons and could theoretically require as few as one drug treatment. NHEJ-based mutation of a regulatory element using a CRISPR/Cas9-based gene editing system, as well as other engineered nucleases including meganucleases and zinc finger nucleases, may be combined with other existing ex vivo and in vivo platforms for cell- and gene-based therapies, in addition to the plasmid electroporation approach described here. For example, delivery of a CRISPR/Cas9-based gene editing system by mRNA-based gene transfer or as purified cell permeable proteins could enable a DNA-free genome editing approach that would circumvent any possibility of insertional mutagenesis.

### 9. GENETIC CONSTRUCTS

[0165] The DNA targeting system may be encoded by or comprised within one or more genetic constructs. The DNA targeting system may comprise one or more genetic constructs. Further provided herein is an isolated polynucleotide sequence encoding the DNA targeting system detailed herein. The polynucleotide may be DNA or RNA or a combination thereof. The genetic construct may be non-viral. The genetic construct, such as a plasmid or expression vector, may comprise a nucleic acid that encodes the DNA targeting system or at least one component thereof. In certain embodiments, a genetic construct encodes one gRNA molecule, i.e., a first gRNA molecule, and optionally a Cas9 molecule or fusion protein. In some embodiments, a genetic construct encodes two gRNA molecules, i.e., a first gRNA molecule and a second gRNA molecule, and optionally a Cas9 molecule or fusion protein. In some embodiments, a first genetic construct encodes one gRNA molecule, i.e., a first gRNA molecule, and optionally a Cas9 molecule or fusion protein, and a second genetic construct encodes one gRNA molecule, i.e., a second gRNA molecule, and optionally a Cas9 molecule or fusion protein. In some embodiments, a first genetic construct encodes one gRNA molecule and one donor sequence, and a second genetic construct encodes a Cas9 molecule or fusion protein. In some embodiments, a first genetic construct encodes one gRNA molecule and a Cas9 molecule or fusion protein, and a second genetic construct encodes one donor sequence.

[0166] Genetic constructs may include polynucleotides such as vectors and plasmids. The genetic construct may be a linear minichromosome including centromere, telomeres, or plasmids or cosmids. The vector may be an expression vectors or system to produce protein by routine techniques and readily available starting materials including Sambrook et al., Molecular Cloning and Laboratory Manual. Second Ed., Cold Spring Harbor (1989), which is incorporated fully by reference. The construct may be recombinant. The genetic construct may be part of a genome of a recombinant viral vector, including recombinant lentivirus, recombinant adenovirus, and recombinant adenovirus associated virus. The genetic construct may comprise regulatory elements for gene expression of the coding sequences of the nucleic acid. The regulatory elements may be a promoter, an enhancer, an initiation codon, a stop codon, or a polyadenylation signal.

[0167] The genetic construct may comprise heterologous nucleic acid encoding the DNA targeting system such as a CRISPR/Cas-based gene editing system and may further comprise an initiation codon, which may be upstream of the DNA targeting system coding sequence, and a stop codon, which may be downstream of the DNA targeting system coding sequence. The genetic construct may include more than one stop codon, which may be downstream of the DNA targeting system coding sequence. In some embodiments, the genetic construct includes 1, 2, 3, 4, or 5 stop codons. In some embodiments, the genetic construct includes 1, 2, 3, 4, or 5 stop codons downstream of the sequence encoding the donor sequence. A stop codon may be in-frame with a coding sequence in the DNA targeting system. For example, one or more stop codons may be in-frame with the donor sequence of a CRISPR/Cas-based gene editing system. The genetic construct may include one or more stop codons that are out of frame of a coding sequence in the DNA targeting system. For example, one stop codon may be in-frame with the donor sequence, and two other stop codons may be included that are in the other two possible reading frames. A genetic construct may include a stop codon for all three potential reading frames. The initiation and termination codon may be in frame with the DNA targeting system coding sequence.

[0168] The vector may also comprise a promoter that is operably linked to the DNA targeting system coding sequence. In some embodiments, the promoter is operably linked to a polynucleotide encoding a CRISPR/Cas-based genome editing system. The promoter may be a constitutive promoter, an inducible promoter, a repressible promoter, or a regulatable promoter. The promoter may be a ubiquitous promoter. The promoter may be a tissue-specific promoter. The tissue specific promoter may be a muscle specific promoter. The tissue specific promoter may be a skin specific promoter. The DNA targeting system may be under the light-inducible or chemically inducible control to enable the dynamic control of gene/genome editing in space and time. The promoter operably linked to the DNA targeting system coding sequence may be a promoter from simian virus 40 (SV40), a mouse mammary tumor virus (MMTV) promoter, a human immunodeficiency virus (HIV) promoter such as the bovine immunodeficiency virus (BIV) long terminal repeat (LTR) promoter, a Moloney virus promoter, an avian leukosis virus (ALV) promoter, a cytomegalovirus (CMV) promoter such as the CMV immediate early promoter, Epstein Barr virus (EBV) promoter, or a Rous sarcoma virus (RSV) promoter. The promoter may also be a promoter from a human gene such as human ubiquitin C (hUbC), human actin, human myosin, human hemoglobin, human muscle creatine, or human metalothionein. Examples of a tissue specific promoter, such as a muscle or skin specific promoter, natural or synthetic, are described in U.S. Patent Application Publication No. US20040175727, the contents of which are incorporated herein in its entirety. The promoter may be a CK8 promoter, a Spc512 promoter, a MHCK7 promoter, for example.

[0169] The genetic construct may also comprise a polyadenylation signal, which may be downstream of the DNA targeting system. The polyadenylation signal may be a SV40 polyadenylation signal, LTR polyadenylation signal, bovine growth hormone (bGH) polyadenylation signal, human growth hormone (hGH) polyadenylation signal, or human (3-globin polyadenylation signal. The SV40 polyadenylation signal may be a polyadenylation signal from a pCEP4 vector (Invitrogen, San Diego, CA).

[0170] Coding sequences in the genetic construct may be optimized for stability and high levels of expression. In some instances, codons are selected to reduce secondary structure formation of the RNA such as that formed due to intramolecular bonding.

[0171] The genetic construct may also comprise an enhancer upstream of the DNA targeting system or the CRISPR/Cas-based gene editing system or gRNAs. The enhancer may be necessary for DNA expression. The enhancer may be human actin, human myosin, human hemoglobin, human muscle creatine or a viral enhancer such as one from CMV, HA, RSV, or EBV. Polynucleotide function enhancers are described in U.S. Pat. Nos. 5,593,972, 5,962,428, and WO94/016737, the contents of each are fully incorporated by reference. The genetic construct may also comprise a mammalian origin of replication in order to maintain the vector extrachromosomally and produce multiple copies of the vector in a cell. The genetic construct may also comprise a regulatory sequence, which may be well suited for gene expression in a mammalian or human cell into which the vector is administered. The genetic construct may also comprise a reporter gene, such as green fluorescent protein (“GFP”) and/or a selectable marker, such as hygromycin (“Hygro”).

[0172] The genetic construct may be useful for transfecting cells with nucleic acid encoding the DNA targeting system or CRISPR/Cas-based gene editing system, which the transformed host cell is cultured and maintained under conditions wherein expression of the DNA targeting system or CRISPR/Cas-based gene editing system takes place. The genetic construct may be transformed or transduced into a cell. The genetic construct may be formulated into any suitable type of delivery vehicle including, for example, a viral vector, lentiviral expression, mRNA electroporation, and lipid-mediated transfection for delivery into a cell. The genetic construct may be part of the genetic material in attenuated live microorganisms or recombinant microbial vectors which live in cells. The genetic construct may be present in the cell as a functioning extrachromosomal molecule.

[0173] Further provided herein is a cell transformed or transduced with a system or component thereof as detailed herein. Suitable cell types are detailed herein. In some embodiments, the cell is a stem cell. The stem cell may be a human stem cell. In some embodiments, the cell is an embryonic stem cell. The stem cell may be a human pluripotent stem cell (iPSCs). Further provided are stem cell-derived neurons, such as neurons derived from iPSCs transformed or transduced with a DNA targeting system or component thereof as detailed herein.

### 10. PHARMACEUTICAL COMPOSITIONS

[0174] Further provided herein are pharmaceutical compositions comprising the above-described genetic constructs or DNA targeting systems, including Targeted Activator System(s), Targeted Repressor System(s) or nuclease systems. Such systems, or at least one component thereof, as detailed herein may be formulated into pharmaceutical compositions in accordance with standard techniques well known to those skilled in the pharmaceutical art. The pharmaceutical compositions can be formulated according to the mode of administration to be used. In cases where pharmaceutical compositions are injectable pharmaceutical compositions, they are sterile, pyrogen free, and particulate free. An isotonic formulation is preferably used. Generally, additives for isotonicity may include sodium chloride, dextrose, mannitol, sorbitol and lactose. In some cases, isotonic solutions such as phosphate buffered saline are preferred. Stabilizers include gelatin and albumin. In some embodiments, a vasoconstriction agent is added to the formulation.

[0175] The pharmaceutical composition may comprise about 1 ng to about 10 mg of DNA encoding the DNA targeting system(s), including the Targeted Activator System(s), Targeted Repressor System(s) or nuclease systems described herein, such as in the form of a DNA construct, an AAV vector or a lentivector. The pharmaceutical composition may comprise about 1 ng to about 10 mg of the gRNA described herein.

[0176] The composition may further comprise a pharmaceutically acceptable excipient. The pharmaceutically acceptable excipient may be functional molecules as vehicles, adjuvants, carriers, or diluents. The pharmaceutically acceptable excipient may be a transfection facilitating agent, which may include surface active agents, quinone analogs, vesicles such as squalene and squalene, hyaluronic acid, lipids, liposomes, calcium ions, viral proteins, polyanions, polycations, including poly-L-glutamate, or nanoparticles, or other known transfection facilitating agents. The carrier may be a non-toxic, inert solid, semi-solid or liquid filler, diluent, encapsulating material or formulation auxiliary of any type. Pharmaceutically acceptable carriers include, for example, diluents, antioxidants, preservatives, solvents, suspending agents, wetting agents, surfactants, propellants, humectants, powders, pH adjusting agents, and combinations thereof. The pharmaceutically acceptable excipient may be a transfection facilitating agent, which may include surface active agents, such as immune-stimulating complexes (ISCOMS), Freunds incomplete adjuvant, LPS analog including monophosphoryl lipid A, muramyl peptides, quinone analogs, vesicles such as squalene and squalene, hyaluronic acid, lipids, liposomes, calcium ions, viral proteins, polyanions, polycations, including poly-L-glutamate, or nanoparticles, or other known transfection facilitating agents.

[0177] The transfection facilitating agent may be a polyanion, polycation, including poly-L-glutamate (LGS), or lipid. The transfection facilitating agent is poly-L-glutamate, and more preferably, the poly-L-glutamate is present in the composition for genome editing in skeletal muscle or cardiac muscle at a concentration less than 6 mg/mL. The transfection facilitating agent may also include surface active agents such as immune-stimulating complexes (ISCOMS), Freunds incomplete adjuvant, LPS analog including monophosphoryl lipid A, muramyl peptides, quinone analogs and vesicles such as squalene and squalene, and hyaluronic acid may also be used administered in conjunction with the genetic construct. In some embodiments, the DNA vector encoding the composition may also include a transfection facilitating agent such as lipids, liposomes, including lecithin liposomes or other liposomes known in the art, as a DNA-liposome mixture (see for example International Patent Publication No. WO9324640), calcium ions, viral proteins, polyanions, polycations, or nanoparticles, or other known transfection facilitating agents. In some embodiments, the transfection facilitating agent is a polyanion, polycation, including poly-L-glutamate (LGS), or lipid.

### 11. ADMINISTRATION

[0178] The DNA targeting systems, or at least one component thereof, as detailed herein, or the pharmaceutical compositions comprising the same, may be administered to a subject. Such compositions can be administered in dosages and by techniques well known to those skilled in the medical arts taking into consideration such factors as the age, sex, weight, and condition of the particular subject, and the route of administration. The presently disclosed DNA targeting systems, or at least one component thereof, genetic constructs, or compositions comprising the same, may be administered to a subject by different routes including orally, parenterally, sublingually, transdermally, rectally, transmucosally, topically, intranasal, intravaginal, via inhalation, via buccal administration, intrapleurally, intravenous, intraarterial, intraperitoneal, subcutaneous, intradermally, epidermally, intramuscular, intranasal, intrathecal, intracranial, and intraarticular or combinations thereof. In certain embodiments, the DNA targeting system, genetic construct, or composition comprising the same, is administered to a subject intramuscularly, intravenously, or a combination thereof. For veterinary use, the DNA targeting systems, genetic constructs, or compositions comprising the same may be administered as a suitably acceptable formulation in accordance with normal veterinary practice. The veterinarian may readily determine the dosing regimen and route of administration that is most appropriate for a particular animal. The DNA targeting systems, genetic constructs, or compositions comprising the same may be administered by traditional syringes, needleless injection devices, “microprojectile bombardment gone guns,” or other physical methods such as electroporation (“EP”), “hydrodynamic method”, or ultrasound.

[0179] The DNA targeting systems, genetic constructs, or compositions comprising the same may be delivered to a subject by several technologies including DNA injection (also referred to as DNA vaccination) with and without in vivo electroporation, liposome mediated, nanoparticle facilitated, recombinant vectors such as recombinant lentivirus, recombinant adenovirus, and recombinant adenovirus associated virus. The composition may be injected into the skeletal muscle or cardiac muscle. For example, the composition may be injected into the tibialis anterior muscle or tail. The DNA Targeting Systems or at least one component thereof, genetic constructs, or compositions comprising the same, may be delivered to a subject non-virally. The DNA Targeting Systems or at least one component thereof, genetic constructs, or compositions comprising the same, may be delivered to a subject via a lipid nanoparticle.

a. Delivery of Protein and Nucleic Acids

[0180] DNA targeting systems, or at least one component thereof, such as fusion proteins, DNA binding proteins, guide RNA(s), and Cas polypeptides (including Cas fusion proteins) can be delivered to cells as DNA, RNA, or as pre-formed ribonucleoprotein complexes (RNPs) formats. The DNA format for the guide RNA will be transcribed into RNA. The DNA and RNA formats for Cas polypeptides or Cas fusion proteins require transcription and/or translation after being introduced into the cell, and the Cas polypeptide preferably also includes one, two or more nuclear localization sequences (NLS) to enhance entry into nucleus. Transfection methods include transfection into the cytoplasm (electroporation, lipofection) or the nucleus (nucleofection, microinjection), all well known in the art.

[0181] The pre-formed RNP format does not require any transcription or translation. If using RNPs, then delivery to the nucleus (nucleofection, microinjection) requires fewer steps. Other techniques to deliver RNPs into cells include induction of transmembrane internalization assisted by membrane filtration (TRIAMF) and induced transduction by osmocytosis and propane betaine (iTOP).

[0182] Similarly, ZF fusion proteins or TALE fusion proteins, comprising a nuclease, an activator or a repressor, can be delivered in a DNA or RNA format. These proteins preferably also include one, two or more NLS to enhance entry into nucleus.

[0183] DNA constructs comprising DNA encoding the guide RNA and/or Cas polypeptides and/or ZF fusion protein and/or TALE fusion protein described herein may comprise, such as, heterologous regulatory elements or transcriptional control signals as described herein for expression of the coding sequences of the nucleic acid. The regulatory elements may include, for example, a promoter, an enhancer, an initiation codon, a stop codon, or a polyadenylation signal.

[0184] The DNA targeting system, such as, nuclease system or Targeted Activator System or Targeted Repressor System, or one or more components thereof, may be encoded by or comprised within a genetic construct. Genetic constructs may include polynucleotides such as vectors and plasmids. The construct may be recombinant. In some embodiments, the genetic construct may comprise a promoter that is operably linked to the polynucleotide encoding at least one gRNA and/or a Cas9 protein. In some embodiments, the promoter is operably linked to the polynucleotide encoding a first gRNA, a second gRNA, and/or a Cas9 protein. The genetic construct may be present in the cell as a functioning extrachromosomal molecule that is not integrated into the chromosome. The genetic construct may be integrated into the chromosome. The genetic construct may be a linear minichromosome including centromere, telomeres, or plasmids or cosmids. The genetic construct may be transformed or transduced into a cell. Further provided herein is a cell transformed or transduced with a DNA targeting system or component thereof as detailed herein. In some embodiments, the cell is a stem cell. The stem cell may be a human stem cell. The stem cell may be a human pluripotent stem cell (iPSCs). Further provided are stem cell-derived neurons, such as neurons derived from iPSCs transformed or transduced with a DNA targeting system or component thereof as detailed herein.

### i) Viral Vectors

[0185] Viral vectors can also be used to transfer DNA or RNA into cells via transduction. Further provided herein is a viral delivery system. The nucleic acid encoding the DNA Targeting system, such as. Targeted Activator System, Targeted Repressor System or nuclease system, is packaged into viral particles which are then introduced into cells. For example, nucleic acid encoding the gRNA and/or Cas sequence is packaged into viral particles. To make the viral particles, generally the plasmid containing the gRNA or Cas9 encoding sequence and plasmids containing viral genes are introduced into a packaging cell line, and viral particles are harvested. Suitable viral vectors include lentivirus, adenovirus, adeno-associated virus (AAV), and herpes viruses. Platforms such as adeno-associated viral vectors (AAVs) are commonly used and can provide sustained expression without integration into the genome. AAV vectors possess significantly lower packaging capability than LVs (<5 kb). Lentivirus are effective in a variety of cells including non-dividing cells and can integrate into the genome or can be non-integrating. Viral vectors can be used to deliver DNA and RNA in vivo to subjects or ex vivo to their cells.

[0186] In some embodiments, the vector is an adeno-associated virus (AAV) vector. The AAV vector is a small virus belonging to the genus Dependovirus of the Parvoviridae family that infects humans and some other primate species. As used herein, the term “adenoviral associated virus (AAV) vector” refers to a vector having functional or partly functional ITR sequences and transgenes. As used herein, the term “ITR” refers to inverted terminal repeats (ITR). The ITR sequences may be derived from an adeno-associated virus serotype, including without limitation, AAV-1, AAV-2, AAV-3, AAV-4, AAV-5, AAV-6, AAV-7, AAV-8, AAV-9, AAV-10, AAV-11, AAV-12. The ITRs, however, need not be the wild-type nucleotide sequences, and may be altered (such as, by the insertion, deletion and/or substitution of nucleotides), so long as the sequences retain function to provide for functional rescue, replication and packaging. AAV vectors may have one or more of the AAV wild-type genes deleted in whole or part, preferably the rep and/or cap genes but retain functional flanking ITR sequences. Functional ITR sequences function to, for example, rescue, replicate and package the AAV virion or particle. Thus, an “AAV vector” is defined herein to include at least those sequences required for insertion of the transgene into a subject's cells. Optionally included are those sequences necessary in cis for replication and packaging (such as, functional ITRs) of the virus.

[0187] AAV vectors may be used to deliver DNA targeting systems using various construct configurations. For example, AAV vectors may deliver Cas9 and gRNA expression cassettes on separate vectors or on the same vector. Alternatively, if the small Cas9 proteins, derived from species such as Staphylococcus aureus or Neisseria meningitidis, are used then both the Cas9 and up to two gRNA expression cassettes may be combined in a single AAV vector within the 4.7 kb packaging limit.

[0188] In some embodiments, the AAV vector is a modified AAV vector. The modified AAV vector may have enhanced cardiac and/or skeletal muscle tissue tropism. The modified AAV vector may be capable of delivering and expressing the CRISPR/Cas9-based gene editing system in the cell of a mammal. For example, the modified AAV vector may be an AAV-SASTG vector (Piacentino et al. Human Gene Therapy 2012, 23, 635-846). The modified AAV vector may be based on one or more of several capsid types, including AAV1, AAV2, AAVS, AAV6, AAV8, and AAV9. The modified AAV vector may be based on AAV2 pseudotype with alternative muscle-tropic AAV capsids, such as AAV2/1, AAV2/6, AAV2/7, AAV2/8, AAV2/9, AAV2.5, and AAV/SASTG vectors that efficiently transduce skeletal muscle or cardiac muscle by systemic and local delivery (Seto et al. Current Gene Therapy 2012, 12, 139-151). The modified AAV vector may be AAV2i8G9 (Shen et al. J. Biot. Chem. 2013, 288, 28814-28823).

[0189] As used herein, the term “lentiviral vector” refers to a vector derived from lentivirus, a family of retroviruses characterized by long incubation periods. To be used safely as a vector, the lentivirus has been modified extensively to delete virulence and replication genes. In addition, the integrase of lentivirus can be deleted or mutated, resulting in a non-replicating and non-integrating lentivector. Integrase-deficient lentiviral vectors (IDLV) can be used to deliver CRISPR-cas systems. Lentivectors carrying Cas polypeptides and guide RNAs are described in U.S. Pub. App. No. 20180201951, incorporated herein by reference in its entirety.

### ii) Nanoparticles

[0190] Lipid materials have been used to create lipid nanoparticles (LNPs) based on ionizable cationic lipids, which exhibit a cationic charge in the lowered pH of late endosomes to induce endosomal escape, because of the tertiary amines in their structure. These LNPs have been used, for example, to deliver RNA interference (RNAi) components, as well as genetic constructs or CRISPR-Cas systems. See, such as, Wlbie et al. (Acc. Chem. Res. 2019, 52, 1555-1564, incorporated by reference) and Wang et al. (Proc. Natl. Acad. Sci. U.S.A. 2016, 113, 2868-2873, incorporated by reference) describe use of biodegradable cationic LNPs. Chang et al. (Acc. Chem. Res. 2019 52, 665-875, incorporated by reference) describe use of ionizable lipid along with cholesterol, DSPC, and a PEGylated lipid to create LNPs.

[0191] Polymer based particles can be used for genetic construct delivery in a similar manner as lipids. A number of materials have been used for delivery of nucleic acids. For example, cationic polymers such as polyethylenimine (PEI) can be complexed to nucleic acids and can induce endosomal uptake and release, similarly to cationic lipids. Dendrimeric structures of poly(amido-amine) (PAMAM) can also be used for transfection. These particles consist of a core from which the polymer branches. They exhibit cationic primary amines on their surface, which can complex to nucleic acids. Networks based on zinc to aid cross-linking of imidazole have been used as delivery methods, relying on the low pH of late endosomes which, upon uptake, results in cationic charges due to dissolution of the zeolitic imidazole frameworks (ZIF), after which the components are released into the cytosol. Colloidal gold nanoparticles have also been used (see, for example, Wilbie et al. Acc. Chem. Res. 2019, 52, 1555-1564, incorporated by reference).

[0192] In some embodiments, the DNA targeting system, or at least one component thereof, is delivered non-virally. Non-viral administration may include administration of the DNA targeting system, or at least one component thereof, without a viral vector. For example, the DNA targeting system, or at least one component thereof, or a polynucleotide encoding the DNA targeting system or at least one component thereof, may be delivered via a nanoparticle. The DNA targeting system, or at least one component thereof, or a polynucleotide encoding the DNA targeting system or at least one component thereof, may be encapsulated within a nanoparticle, such as a lipid nanoparticle or a polymeric nanoparticle.

### 12. METHODS

a. Methods for Stably Activating a Gene or Gene Product

[0193] Provided herein are methods of stably activating a gene or gene product within the imprinted 15q11-13 locus in a subject having Prader Willi Syndrome (PWS) or Prader-Willi-like disorder. The method may include non-virally administering to the subject a DNA targeting system that targets a target region in the imprinted 15q11-13 PWS-associated locus as detailed herein.

[0194] Further provided herein are methods of stably expressing a gene or gene product within the imprinted 15q11-13 locus in a subject having Prader Willi Syndrome (PWS) or Prader-Willi-like disorder. The method may include non-virally administering to the subject a DNA targeting system that targets a target region in the imprinted 15q11-13 PWS-associated locus as detailed herein.

[0195] In some embodiments, at least one component of the DNA targeting system is transiently expressed in a cell from the subject or transiently delivered to a cell from the subject. Transient expression may include expression for a short period of time, such as, for example, less than 24 hours, less than 1 day, less than 2 days, less than 3 days, less than 4 days, less than 5 days, less than 6 days, less than 7 days, or less than 8 days post-administration, relative to a control. Stable expression of a gene or gene product may include maintained and/or consistent expression of the gene or gene product for an extended period of time, relative to a control. Expression of a gene within the imprinted 15q11-13 locus may be maintained in a cell from the subject for, for example, at least 10 days, at least 15 days, at least 20 days, at least 25 days, at least 26 days, at least 30 days, at least 35 days, at least 40 days, at least 45 days, at least 48 days, at least 50 days, or at least 55 days post-administration, relative to a control. Expression of a gene within the imprinted 15q11-13 locus may be maintained in a cell from the subject for, for example, at least 1 week, at least 2 weeks, at least 3 weeks, at least 4 weeks, at least 5 weeks, at least 6 weeks, at least 7 weeks, at least 8 weeks, at least 9 weeks, or at least 10 weeks post-administration, relative to a control.

[0196] The expression of a gene or gene product within the imprinted 15q11-13 PWS-associated locus may be increased. The expression of a gene or gene product within the imprinted 15q11-13 PWS-associated locus may be increased by at least about 5%, 10%, 15%, 20%, 25%, 30%, 35%, 40%, 45%, 50%, 55%, 60%, 65%, 70%, 75%, 80%, 85%, 90%, 95%, 1.5-fold, 2-fold, 3-fold, 4-fold, 5-fold, 6-fold, 7-fold, 8-fold, 9-fold, or 10-fold, relative to a control. The expression of the gene or gene product within the imprinted 15q11-13 PWS-associated locus may be increased by less than about 10%, 15%, 20%, 25%, 30%, 35%, 40%, 45%, 50%, 55%, 60%, 65%, 70%, 75%, 80%, 85%, 90%, 95%, 1.5-fold, 2-fold, 3-fold, 4-fold, 5-fold, 6-fold, 7-fold, 8-fold, 9-fold, or 10-fold, relative to a control. The expression of the gene or gene product within the imprinted 15q11-13 PWS-associated locus may be increased by about 5-95%, 10-90%, 15-85%, 20-80%, or 1.5-fold to 10-fold, relative to a control. A control may be, for example, an expression level pre-administration.

b. Methods for Treating Prader-Willi Syndrome (PWS)

[0197] Provided herein are methods for treating Prader-Willi Syndrome (PWS) in a subject in need thereof. The method may include administering to the subject a DNA targeting system as detailed herein, an isolated polynucleotide sequence as detailed herein, a vector or genetic construct as detailed herein, a modified cell as detailed herein, or a combination thereof. In some embodiments, the expression of at least one gene within the 15q11-q13 locus is increased in the subject or in a sample therefrom. In some embodiments, the expression of at least one gene within the 15q11-q13 locus is increased in the subject or in a sample therefrom, such as from activation of the maternal copy of the gene. In some embodiments, the expression of at least one RNA transcript selected from SNRPN, SNORD115, and SNORD116, or a combination thereof, is increased in the subject or in a sample therefrom. In some embodiments, the initiation of transcription from the SNRPN promoter, SNORD115 promoter, SNORD116 promoter, or a combination thereof, is increased in the subject or in a sample therefrom.

[0198] The disclosure herein identifies target regions within the PWS associated locus of chromosome 15q11-13 that can be targeted by the DNA targeting systems, such as, Targeted Activator Systems, for activation, to increase expression of genes and gene products to treat PWS. Relative to position 1 being the start sire of the SNRPN gene exon 1 of the PWS imprinting center on chromosome 15, the target regions of interest for activation are at nucleotide positions −127023 to −125023; nucleotide positions −93065 to −91065; and/or nucleotide positions −1104 to +896. More specifically, the target regions are at nucleotide positions −126523 to 125523; nucleotide positions −92565 to −91565; and/or nucleotide positions −604 to +396. Even more specifically, the target region encompasses nucleotide positions −126023, −92065, and/or −104, and may be within about 100-1000, about 100-900, about 100-800, about 100-700, about 100-600, about 100-500, about 100-400, about 100-300 or about 100-200 bp upstream, or downstream, of the target region of the DNA identified herein.

[0199] The disclosure herein also identifies target regions within the PWS associated locus of chromosome 15q11-13 that can be targeted by the DNA targeting systems, such as Targeted Repressor Systems, for repression, to increase expression of genes and gene products to treat PWS. Relative to position 1 being the start site of the SNRPN gene exon 1 of the PWS imprinting center on chromosome 15, the target regions of interest for activation are at nucleotide positions +23022 to +25022 and/or +34734 to +36734. More specifically, the target regions are at nucleotide positions +23522 to +24522 and/or +35234 to +36234. Even more specifically, the target region encompasses nucleotide positions +24022 and/or +35734, and may be within about 100-1000, about 100-900, about 100-800, about 100-700, about 100-600, about 100-500, about 100-400, about 100-300 or about 100-200 bp upstream, or downstream, of the target region of the DNA identified herein.

[0200] Relative to position 1 being the start site of the SNRPN gene exon 1 of the PWS imprinting center on chromosome 15, additional target regions of interest for activation and/or demethylation include regions at positions −126547 to −124695 [mat1]; −131937 to −130580 [mat1A]; −129415 to −127715 [mat1B]; −123798 to −122440 [mat1C]; −92568 to −91460 [mat2]; −797 to +1346 [mat3]; and/or +12858 to +14026 [mat4]. More specifically, within these regions, further subregions include target regions at positions: −126047 to −125195 [mat1]; −131437 to −131080 [mat1A]; −128915 to −128215 [mat1B]; −123298 to −122940 [mat1C]; −92068 to −91960 [mat2]; −297 to +846 [mat3]; and/or +13358 to +13526 [mat4]. Even more specifically, within these subregions, further subregions include target regions at positions: −126047 to −125947; −125997 to −125897; −125947 to −125847; −125897 to −125797; −125847 to −125747; −125797 to −125697; −125747 to −125647; −125697 to −125597; −125647 to −125547; −125597 to −125497; −125547 to −125447; −125497 to −125397; −125447 to −125347; −125397 to −125297; −125347 to −125247; −125297 to −125195; and/or −125247 to −125195 [mat1]; −131437 to −131337; −131387 to −131287; −131337 to −131237; −131287 to −131187; −131237 to −131137; −131187 to −131087; −131137 to −131037; and/or −131087 to −131080 [mat1A]; −128915 to −128815; −128865 to −128765; −128815 to −128715; −128765 to −128665; −128715 to −128615; −128665 to −128656; −128615 to −128515; −128565 to −128465; −128515 to −128415; −128465 to −128365; −128415 to −128315; −128365 to −128265; and/or −128315 to −128215 [mat1B]; −123298 to −123198; −123248 to −123148; −123198 to −123098; −123148 to −123048; −123098 to −122998; −123048 to −122948; and/or −122998 to −122940 [mat1C] −92068 to −91968; −92018 to −91918; and/or −91968 to −91960 [mat2]; −297 to −187; −247 to −147; −197 to −97; −147 to −47; −97 to +3; −47 to +53; +3 to +100; +53 to +153; +103 to +203; +153 to +253; +203 to +303; +253 to +353; +303 to +403; +353 to +453; +403 to +503; +453 to +553; +503 to +603; +553 to +653; +603 to +703; +653 to +753; +703 to +803; +753 to +846; and/or +803 to +848 [mat3] and/or +13358 to +13458; +13408 to +13508; +13458 to +13526; and/or +13508 to +13526 [mat4].

[0201] Relative to position 1 being the start site of the SNRPN gene exon 1 of the PWS imprinting center on chromosome 15, additional target regions of interest for repression include regions at positions −101358 to −94223 [pat1]; −58232 to −51914 [pat2]; −4847 to −3047 [pat3]; −1774 to +2421 [pat4]; +2446 to +24016 [pat5]; +23346 to +25082 [pat6]; +24340 to +35718 [pat7]; and/or +35206 to +36668 [pat8]. More specifically, within these regions, further subregions include target regions at positions: −100858 to −94723[pat1]; −57732 to −52414 [pat2]; −4347 to −3547 [pat3]; −1275 to +1921 [pat4]; +2946 to +23516 [pat5]; +23846 to +24582 [pat6]; +24840 to +35218 [pat7]; and/or +35706 to +36168 [pat8]. Even more specifically, within these subregions, further subregions include target regions at positions: +23846 to +23946; +23896 to +23996; +23946 to +24046; +23996 to +24096; +24046 to +24146; +24096 to +24196; +24146 to +24246; +24196 to +24296; +24246 to +24346; +24296 to +24396; +24346 to +24446; +24396 to +24496; +24446 to +24546; and/or +24496 to +24582; [pat6]; +35706 to +35806; +35756 to +35856; +35806 to +35906;+35856 to +35956; +35906 to +36006; +35956 to +36056; +36006 to +36106; +36056 to +36156; and/or +36106 to +36168 [pat8].

### 13. EXAMPLES

### Example 1

### Materials and Methods

[0202] Generation of SNRPN-2A-GFP Plurpotent Stem Cel Lines. A human iPS cell line (RVR-iPSCs) was used to construct the maternal and paternal SNRPN-2A-GFP reporter lines. RVR-iPSCs were retrovirally reprogrammed from BJ fibroblasts and characterized previously (Lee, et al. Cell, 2012, 151, 547-58, incorporated by reference). To generate the SNRPN-2A-GFP reporter lines, 3×10⁶ cells were dissociated with Accutase (Stemcell Tech, 7920) and electroporated with 6 μg of gRNA-Cas9 expression vector and 3 μg of SNRPN targeting vector using the P3 Primary Cell 4D-Nucleofector Kit (Lonza, V4XP-3032). The transfected cells were plated into a 10 cm dish coated with Matrigel (Corning, 354230) in complete mTesR1 (Stemcell Tech, 85850) supplemented with 10 μM Rock Inhibitor (Y-27632, Stemcell Tech, 72304). Twenty-four hours after transfection, positive selection began with 1 μg/mL puromycin for 7 days. Following selection, cells were transfected with a CMV-CRE recombinase expression vector to remove the foxed puromycin selection cassette. The transfected cells were expanded and plated at low density of 180 cells/cm² for clonal isolation. The resulting clones were mechanically picked and expanded, and gDNA was extracted using QuickExtract DNA Extraction Solution (Lucigen, QE09050) for PCR screening of targeting vector integration. A polyclonal cell line expressing lentivirally transduced dCas9-KRAB, VP64-dCas9-VP64, or Tet1c-dCas9 was used for the CRISPR screens and validations.

[0203] Cell Culture. Human iPSCs were maintained in mTeSR1 (StemCell Tech, 85850) or mTeSR Plus (StemCell Tech, 100-0276) on Matrigel-coated tissue culture plastic in a 37° C. incubator with 5% CO₂. Prior to use, plates were coated with Matrigel (Corning, 354230) at a concentration of 1 mg per 24 mL DMEM/F12 (Gibco, 11320033) and incubated for at least 1 hour at 37° C. The cell culture medium was supplemented with 10 μM ROCK inhibitor (ROCKi) (Y-27632, Stemcell Tech, 72304) for 16-48 hours before cells were passaged with Accutase (StemCell Tech, 07920; Innovative Cell Technologies, AT104; Gibco A1110501) and otherwise omitted.

[0204] IPSC Nucleofection and Cell Sorting. For plasmid nucleofection, iPSCs were detached from the plate with Accutase diluted 1:1 in divalent cation-free PBS. After cells were removed from the plate, the cells were counted, spun down for 10 minutes at 100×g, and resuspended in Lonza P3 Primary Cell Nucleofector Solution (Lonza, VXP-3024) at approximately 8 million cells per 100 μL reaction. The desired plasmid was prepared at concentration of 10 μg of plasmid per 100 μL reaction. After preparing the plasmid, cells were nucleofected with the Nucleofector X Unit (Lonza) using program CB-150. The samples were immediately resuspended in pre-warmed mTeSR Plus media with 10 μM ROCKi and transferred to 6-well plates at a cell density of 4-8 million cells per well.

[0205] After an 18-24 hour incubation, cells were washed with PBS, and adherent cells were detached from the plate with Accutase. Samples were stained in PBS with eBioscience Fixable Viability Dye eFluor 780 (Invitrogen, 65-0865-18) and Anti-Rat CD90 Antibody FITC (referred to in the text as mouse Thy1) (StemCell, 60024FI.1, Lot no. 1000072622). The remaining stained and un-transfected cells were used as a negative control for the anti-CD90 antibody. The live, CD90-positive cells were sorted with the Sony SH800Z cell sorter into tubes containing DMEM/F12, 10 μM ROCKi, and 1% antibiotic-antimycotic (Gibco, 15240062).

[0206] Approximately 20% of the sorted cells were pelleted and flash-frozen for RNA extractions. The remaining approximately 80% of the cells were pelleted for 5 minutes at 300×g, re-suspended in mTeSR Plus, 10 μM ROCKi, and 1% antibiotic-antimycotic, and plated in 24-well plates. One or two days later, the media was changed to mTeSR Plus without antibiotic-antimycotic. After approximately 2-3 days, colonies of cells appeared well-established and ROCKi was omitted from the media. The media was changed daily or once every two days.

[0207] Neuronal Differentiation. Wild-type (WT) and ΔPWS iPSCs were differentiated via Ngn2 over-expression as described in a published protocol, with modifications (Wang, et al. Stem Cell Reports, 2017, 9, 1221-1233, incorporated by reference). Briefly, iPSCs were transduced during plating with lentiviruses encoding TetO-mNgn2 and hUBC-M2rtTA to deliver doxycycline-responsive mouse Ngn2 cDNA. After transduction, cells were maintained in mTeSR Plus with 10 μM ROCKi for one day. The next day, media was changed to pre-differentiation media with 2 μg/mL doxycycline, as described in the Wang protocol. The media was changed daily. Two days later, the pre-differentiated cells were detached and re-plated in post-differentiation media with 2 μg/mL doxycycline at approximately 100,000 cells per cm². After the cells were re-plated, partial media changes not containing doxycycline occurred every 7 days.

[0208] Lentiviral Production and Titration. HEK293T cells were acquired from the American Tissue Collection Center (ATCC) and purchased through the Duke University Cell Culture Facility. The cells were maintained in DMEM High Glucose supplemented with 10% FBS and 1% penicillin-streptomycin and cultured at 37° C. with 5% CO₂.

[0209] For lentiviral production of the gRNA libraries, VP64-dCas9-VP64 and dCas9-KRAB, 4.5×10⁸ cells were transfected using the calcium phosphate precipitation method (Salmon, et al, Curr Protoc Hum Genet, 2007, Chap. 12, incorporated by reference) with 6 μg pMD2.G (Addgene #12259), 15 μg psPAX2 (Addgene #12260), and 20 μg of the transfer vector. The medium was exchanged 12-14 hours after transfection, and the viral supernatant was harvested 24 and 48 hours after this medium change. The viral supernatant was pooled and centrifuged at 600×g for 10 min, passed through a PVDF 0.45 μm filter (Millipore, SLHV033RB), and concentrated to 50× in 1×PBS using Lenti-X Concentrator (Clontech, 631232) in accordance with the manufacturer's protocol.

[0210] To produce lentivirus for gRNA validations or dCas9 effectors, 1.2×10⁶ cells were transfected in 6-well plates using Lipofectamine 3000 (Invitrogen, L3000008) according to the manufacturer's instructions with 200 ng pMD2.G (Addgene #12259), 600 ng psPAX2 (Addgene #12260), and 500 ng of the transfer vector. The medium was exchanged 6 hours after transfection, and the viral supernatant was harvested 24 and 48 hours after transfection. The viral supernatant was pooled and filtered through a 0.45 μm filter or centrifuged for 10 min at 600×g to remove cell debris, then concentrated to 50× in 1×PBS using Lenti-X Concentrator (Takara, 631232), in accordance with the manufacturer's protocol.

[0211] The titer of the lentiviral gRNA library pool was determined by transducing 3×10⁴ cells with serial dilutions of lentivirus and measuring the percent mCherry expression 4 days after transduction with a SH800 FACS Cell Sorter (Sony Biotechnology). All lentiviral titrations were performed in the cell lines used in the CRISPR screens.

[0212] RNA Isolation and Quantitative RT-PCR. Total RNA was isolated using RNeasy Plus (Qiagen, 74136) and QIAshredder kits (Qiagen, 79656) for VP64 and KRAB gRNA validations in SNRPN-2A-GFP iPSCs. Total RNA was isolated using Norgen Total RNA Purification Plus Micro kit (Norgen, 48500) for other experiments, including RNA sequencing.

[0213] Reverse transcription was carried out on 0.1-0.5 μg total RNA per sample in a 10 or 20 μL reaction using the SuperScript VILO Reverse Transcription Kit (Invitrogen, 11754). Ten nanograms of cDNA was used per PCR reaction with Perfecta SYBR Green Fastmix (Quanta BioSciences, 95072) using the CFX96 Real-Time PCR Detection System (Bio-Rad). All amplicon products were verified by melting curve analysis. Additionally, the qRT-PCR results are presented as fold change in RNA normalized to GAPDH expression.

[0214] To purify poly(A) RNA, total RNA was first isolated using RNeasy Plus (Qiagen) as described above. Poly(A) RNA was purified from 1 μg total RNA using RNA purification beads as part of the Truseq Stranded mRNA kit according to the manufacturer's protocol (Illumina). For each qRT-PCR reaction, 1 ng of poly(A)-enriched RNA was used.

[0215] RNA Sequencing andData Analysis. For RNA sequencing, total RNA isolated with the Norgen RNA Purification Plus Micro kit (Norgen, 48500) was submitted to Genewiz for total RNA sequencing. Genewiz verified quality of samples and libraries and performed DNAse treatment as necessary.

[0216] Sequencing reads were trimmed with Trimmomatic to remove adapters and filter on read quality. Each read was mapped to hg19 with STAR. DeepTools bamCoverage was used to generate RPKM-normalized bedgraph files, then bedGraphToBigWig was used to convert bedgraph to bigwig files for visualization in the genome browser. Additionally, read counts for each gene were created using the featureCounts function. Differential expression analysis was performed with DESeq2.

[0217] Plasmid Construction. The lentiviral VP64-dCas9-VP64 plasmid was generated by modifying Addgene #59791 to replace GFP with BSD blasticidin resistance. The Tet1c-dCas9 plasmid was generated by amplifying Tet1c from Addgene #108245, followed by Gibson assembly of Tet1c, dCas9, and BSD into a lentiviral expression backbone. The dCas9-KRAB plasmid is equivalent to Addgene #67620 but with BSD replacing GFP, and the LacZ gene is not present in the backbone. The Tet1c-Cas9-T2A-Thy1.1 plasmid for transfection was generated by replacing BFP in Addgene #167983 with mouse Thy1.1 (CD90).

[0218] The gRNA expression plasmid for the single gRNA screens was generated by modifying Addgene #83925 to contain an optimized gRNA scaffold, in which a puromycin resistance gene is incorporated in place of Bsr and an mCherry transgene is incorporated in place of GFP. For creating stable gRNA-expressing cell lines in WT and ΔPWS iPSCs for nucleofection of the Tet1c-Cas9 effector, we used a gRNA expression plasmid that was further modified by removing the mCherry transgene.

[0219] The gRNA expression plasmid for the dual gRNA screen was generated by further modification of the single gRNA expression plasmid to contain an additional gRNA cassette expressing sg-mat1 under control of the mU6 Pol III promoter with a modified gRNA scaffold described previously. Individual gRNAs were ordered as oligonucleotides (Integrated DNA Technologies) and cloned into the gRNA expression plasmids using BsmBI sites.

[0220] The SNRPN targeting vector was cloned by inserting approximately 700 bp homology arms (surrounding the SNRPN stop codon in exon 10), amplified by PCR from genomic DNA of RVR-iPS cells, and subsequently flanking a P2A-GFP sequence with a LoxP-puromycin resistance cassette.

[0221] gRNA Library Design and Cloning. For the full gRNA library, the gt-scan algorithm (O'Brien, et al, Bioinformatics, 2014, 30, 2673-2675, incorporated by reference) was used to identify all possible gRNAs within the chromosome 15q11-13 region and rank the gRNAs by off-target alignments to the human genome. DNase I hypersensitivity sites (DHSs) for H1 human embryonic stem cells (H1 hESCs) were downloaded from ENCODE (http://www.encodeproject.org). The high-density gRNA region spanned chr15:25,064,194-25,368,441 (hg19) and consisted of the top 30% of all gRNAs within this region ranked by off-target score. Outside of the high-density region and within chr15:23,692,325-26,425,399 (hg19), all gRNAs within DHS coordinates in H1 hESCs were selected for inclusion in the library. In total, 11,751 gRNAs were designed, including 531 non-targeting control gRNAs that were selected from a previous genome-wide CRISPRi gRNA library (Horibeck, et al, eLife, 2016, 5, incorporated by reference). For the gRNA sub-library used in the Tet1c-dCas9 screen, all hits (adjusted p-value<0.05) from the previous CRISPRa and CRISPRi screens were included, in addition to 50 non-targeting control gRNAs, for a total of 583 gRNAs. For both gRNA libraries, the oligonucleotide pool (Twist Bioscience) was amplified with PCR and cloned using Gibson assembly into the single or dual gRNA expression plasmid.

[0222] dCas9-KRAB and VP64-dCas9-VP64 SNRPN-2a-GFP Screens. Each screen was performed in triplicate with independent transductions. For each replicate, 24×10⁶ SNRPN-2A-GFP VP64-dCas9-VP64 (maternal) or dCas9-KRAB (paternal) iPSCs were detached from the plate using Accutase (Stemcell Tech, 7920) and transduced in suspension across five matrigel-coated 15-cm dishes in mTesR (Stemcell Tech 85850) supplemented with 10 μM ROCK inhibitor (Y-27632, Stemcell Tech, 72304). Cells were transduced at a multiplicity of infection (MOI) of 0.2 to obtain one gRNA per cell and ˜430-fold coverage of the gRNA library. The medium was changed to fresh mTesR without ROCK inhibitor 18-20 hours after transduction. Antibiotic selection was started 30 hours after transduction by adding 1 μg/mL puromycin (Sigma, P8833) directly to the plates without changing the medium. The cells were fed daily and passaged as necessary maintaining library coverage until harvest.

[0223] Cells were harvested for sorting 9 days after transduction of the gRNA library for all three screens. Cells were washed once with 1×PBS, detached using Accutase, filtered through a 30 μm CellTrics filter (Sysmex, 04-004-2326), and resuspended in fluorescence-activated cell sorting (FACS) Buffer (0.5% BSA (Sigma, A7906), 2 mM EDTA (Sigma. E7889) in PBS). Before sorting, an aliquot of 4.8×10⁸ cells was taken to represent a bulk unsorted population. The highest and lowest 10% of cells were sorted based on GFP expression and 4.8×10⁸ cells were sorted into each bin. Sorting was completed with a SH800 FACS Cell Sorter (Sony Biotechnology). After sorting, genomic DNA was harvested with the DNeasy Blood and Tissue Kit (Qiagen, 69506).

[0224] Tet1c-dCas9 and VP64-dCas9-VP64 SNRPN-2A-GFP Sub-Library Screens. The screen was performed in triplicate with independent transductions. For each replicate, 1.7×10⁶ matSNRPN-2A-GFP Tet1c-dCas9 or VP64-dCas9-VP64 iPSCs were detached using Accutase (Stemcell Tech, 7920) and transduced in suspension in a matrigel-coated 10-cm dish in mTesR (Stemcell Tech 85850) supplemented with 10 μM ROCK inhibitor (Y-27632, Stemcell Tech, 72304). Cells were transduced at a MOI of 0.2 to obtain one gRNA per cell and approximately 580-fold coverage of the gRNA sub-library. The medium was changed to fresh mTesR without ROCK inhibitor 18-20 hours after transduction. Antibiotic selection was started 30 hours after transduction by adding 1 μg/mL puromycin (Sigma, P8833) directly to the plates without changing the medium. The cells were fed daily and passaged as necessary maintaining library coverage until harvest.

[0225] Cells were harvested for sorting 14 days after transduction of the gRNA sub-library. Cells were washed once with 1×PBS, detached using Accutase, filtered through a 30 μm CellTrics filter (Sysmex, 04-004-2326) and resuspended in FACS Buffer (0.5% BSA (Sigma, A7906), 2 mM EDTA (Sigma, E7889) in PBS). Before sorting, an aliquot of 0.4×10⁸ cells was taken to represent a bulk unsorted population. The highest and lowest 10% of cells were sorted based on GFP expression, and 0.4×10⁶ cells were sorted into each bin. Sorting was done with a SH800 FACS Cell Sorter (Sony Biotechnology). After sorting, genomic DNA was harvested with the DNeasy Blood and Tissue Kit (Qiagen, 69506).

[0226] Genomic DNA Sequencing. The gRNA libraries were amplified from each gDNA sample across 100 μL PCR reactions using Q5 hot start polymerase (NEB, M0493) with 1 μg of gDNA per reaction. The PCR amplification was done according to the manufacturer's instructions, using 25 cycles at an annealing temperature of 60° C. with the following primers:

Fwd:
(SEQ ID NO: 1143)
5′-AATGATACGGCGACCACCGAGATCTACACAATTTCTTGGGTAG
TTTGCAGTT
Rev:
(SEQ ID NO: 1144)
5′-CAAGCAGAAGACGGCATACGAGAT-(6-bp index sequence)-
GACTCGGTGCCACTTTTTCAA

[0227] The amplified libraries were purified with Agencourt AMPure XP beads (Beckman Coulter, A63881) using double size selection of 0.65× and then 1× the original volume. Each sample was quantified after purification with the Qubit dsDNA High Sensitivity assay kit (Thermo Fisher, Q32854). Samples were pooled and sequenced on a MiSeq (Illumina) with 21-bp paired-end sequencing using the following custom read and index primers:

Read1:
(SEQ ID NO: 1145)
5′-GATTTCTTGGCTTTATATATCTTGTGGAAAGGACGAAACACCG
Index:
(SEQ ID NO: 1146)
5′-GCTAGTCCGTTATCAACTTGAAAAAGTGGCACCGAGTC
Read2:
(SEQ ID NO: 1147)
5′-GTTGATAACGGACTAGCCTTATTTAAACTTGCTATGCTGTTTC
CAGCATAGCTCTTAAAC

[0228] Data Processing and Enrichment Analysis. FASTQ files were aligned to custom indexes (generated from the bowtie2-build function) using Bowtie 2 (Langmead, B. & Salzberg, S. L. Nat. Methods 2012, 9, 357-359, incorporated by reference). Counts for each gRNA were extracted and used for further analysis. All enrichment analysis was done with R. Individual gRNA enrichment was determined using the DESeq2 (Love et al. Genome Biology 2014, 15, 550, incorporated by reference) package to compare between high and low, unsorted and low, or unsorted and high conditions for each screen.

[0229] gRNA Validations. The top enriched gRNAs from the screens were individually cloned into the appropriate gRNA expression vector as described previously. The gRNA validations were performed similarly as done with the screens using maternal or paternal SNRPN-2A-GFP lines stably expressing either dCas9-KRAB or VP64-dCas9-VP64, except the transductions were performed in 24-well plates and the virus was delivered at high MOI. For the validations of the dCas9-KRAB paternal screen, single gRNAs were tested per region. For the validations of the VP64-dCas9-VP64 maternal screen, pools of 3-4 gRNAs were tested per region in SNRPN-2A-GFP iPSCs. For validations of the Tet1c-dCas9 screen and all studies in WT and ΔPWS iPSCs, single gRNAs were tested except when otherwise specified. Cells were cultured on matrigel-coated 24-well plates in mTesR and harvested for flow cytometry or qRT-PCR 5-7 days after gRNA transduction for dCas9-KRAB and 9-14 days after gRNA transduction for VP64-dCas9-VP64 and Tetlc-dCas9.

[0230] Bisulphite Primer Design, Bisulphite Conversion, and Sequencing. Primer pairs for bisulphite sequencing were designed for the target region using Zymo Research Bisulfite Primer Seeker, with a maximum amplicon length of 400 bp. Each primer set was initially tested on WT and ΔPWS iPSC Tet1c-dCas9 stable lines (with no gRNA) with 400 ng input gDNA per conversion reaction. To validate primer pair on bisulphite-converted gDNA, we used bisulphite-converted product as input in PCR reactions and tested an annealing temperature gradient ranging from 55-82° C. for 30 cycles with Kapa Uracil+HotStart ReadyMix polymerase (Roche, 7959052001). Samples of each PCR product were run on a 2% agarose gel. Products displaying bands of the expected size without primer dimer or off-target were Sanger-sequenced (Genewiz) to verify that the correct region was amplified and that the expected proportion of T/C reads were present at each differentially methylated cytosine within the region. Of four tested primer pairs, two pairs were found to amplify the expected region within the PWS-IC specifically. We proceeded with the primer pair that produces a 400 bp amplicon covering 24 CpG sites within the PWS-IC.

[0231] For bisulphite sequencing of iPSCs and neurons, genomic DNA was extracted from cultured cells with the Qiagen DNEasy Blood and Tissue kit (Qiagen, 69504). gDNA was stored at −80° C. For the bisulphite conversion reaction 250 ng of gDNA was used. For bisulphite conversion and purification, Zymo EZ DNA Methylation Gold kit was used as instructed (Zymo, D5005). An aliquot (2 μL) of bisulphite-converted gDNA was used as input for PCR as described above, with an annealing temperature of 57° C. The PCR1 reactions were then cleaned with Ampure XP beads (Beckman, A63881) at a ratio of 1.8×. An aliquot ( 1/10^{th}) of PCR1 was used as input for PCR2 with Q5 polymerase. PCR2 added i5 and i7 barcodes and P5 and P7 overhangs for dual-index Illumina short read sequencing.

[0232] PCR2 products were purified with Ampure XP beads. Products were visualized via electrophoresis on an Agilent TapeStation 4200 and quantified with Qubit dsDNA HS assay kit (Invitrogen. Q32851) on a Qubit fluorometer (Invitrogen). Libraries were pooled and sequenced on an Illumina Miseq instrument with a Miseq v3 600 cycle kit (Illumina, MS-102-3003) with read lengths of 250×250.

[0233] Bisulphite Sequencing Data Analysis. From the raw read files, we used Trimmomatic (Bolger et al. Bioinformatics 2014, 30, 2114-2120, incorporated by reference) to trim reads using the following settings:

HEADCROP:25; ILLUMINACLIP:TruSeq3-PE-2.fa:2:30:10;
TRAILING:20; SLIDINGWINDOW:4:15; MINLEN:40

[0234] Bismark (Krueger and Andrews. Bioinformatics 2011, 27,1571-1572, incorporated by reference) was used to create a bisulphite-converted reference genome from the hg19 genome build. Trimmed, paired-end reads were aligned to the genome and analysed with Bismark version 0.22.3. The output coverage files were used to determine percentage of methylated cytosine for each CpG site in the amplicon.

[0235] HCR FlowRSH. For HCR FlowFISH, reagents and probe sets were ordered from Molecular Instruments. Buffer set formulations were for cells in suspension. Approximately 2 million cells per sample were detached from the plate with Accutase and processed according to the protocol as described in Reilly et al., except that probe hybridisation buffer, probe wash buffer, and amplification buffer were used from Molecular Instruments (Reilly, et al. Nature Genetics, 2021, 53,1166-1176, incorporated by reference). Probe sets were used at a 4 nM concentration. Fixation and permeabilization buffer was prepared fresh as 4% paraformaldehyde (Electron Microscopy Sciences, 15710) and 0.1% Tween-20 (Roche, 11332465001) in 1× divalent cation-free phosphate-buffered saline. After staining, cells were analysed on a Sony SH800Z cell sorter.

[0236] ATAC Sequencing. iPSCs were detached from the plate using Accutase, and viability and cell number were assessed with a Countess II cell counter (Invitrogen) and Trypan Blue (Invitrogen, T10282), 45,000 cells per sample were processed for ATAC-seq according to the Omni-ATAC protocol (Corces, et al. Nature Methods, 2017, 14, 959-962, incorporated by reference). Libraries were sequenced on an Illumina NovaSeq with 2×25 paired-end reads with a coverage of 50 million reads per sample.

[0237] Reads were trimmed with Trimmomatic (Bolger et al. Bioinformatics 2014, 30, 2114-2120, incorporated by reference) to remove adapter content and filter on quality score, then trimmed reads were aligned to hg19 using Bowtie2 (Langmead, B. & Salzberg, S. L. Nat. Methods 2012, 9, 357-359, incorporated by reference). Reads mapping to ENCODE blacklisted regions were removed, and duplicated reads were removed with Picard MarkDuplicates. Peaks were called using MACS2 (Zhang et al. Genome Biol. 2008, 9, R137, incorporated by reference). For visualization, bamCoverage was used to generate rpkm-normalized bigwig files from deduplicated bam files. Quality of each sample was assessed based on number of uniquely mapping reads after blacklist removal. A union peak set was generated from narrowPeak files of all samples. The count files for each sample were generated using the featureCounts function.

[0238] Differential peak analysis was conducted with DESeq2 on the feature count files with an adjusted p-value threshold of p<0.01 for differential peak analysis.

### Example 2

### Generation of SNRPN-2A-GFP Reporter Cell Lines for CRISPER Screening

[0239] There are several imprinted genes within the chromosome 15q11-13 region, including the paternally expressed protein-coding genes MAGEL2, NDN, and SNURF-SNRPN, along with numerous noncoding RNAs (ncRNAs), including the snoRNA clusters SNORD115 and SNORD116 (FIG. 1A). Prader-Willi Syndrome (PWS) patient genotypes commonly consist of deletions within 15q11-13 that encompass several of the coding and noncoding genes, although a subset of genotypes emphasize the snoRNA clusters as having particular influence in the etiology of PWS. Further evidence suggests that SNURF-SNRPN and downstream ncRNAs, including SPA RNAs and snoRNAs, are processed from a single host transcript that initiates at the PWS imprinting center (PWS-IC). Given that imprinting within 15q11-13 may be orchestrated in part by the PWS-IC, which is in exon 1 of SNRPN and serves as the initiation of a host transcript that processes several genes implicated in PWS, SNRPN expression was chosen as a proxy for the imprinting status of the 15q11-13 locus.

[0240] Through CRISPR/Cas9-based homologous recombination, the coding sequence of superfolder GFP (sfGFP) was inserted into exon 10 of SNRPN in a wild-type human iPSC line (FIG. 2A, FIG. 2B). A P2A skipping peptide was added between SNRPN and sfGFP to link the expression of the two proteins while avoiding disruption of SNRPN function, localization or stability that could result from direct fusion to GFP. Additionally, a wild-type iPSC line with two intact copies of 15q11-13 was used in order to isolate heterozygous clones with SNRPN-2A-GFP on either the maternal or paternal allele. Using this method, only the paternally tagged cells will be GFP-positive if imprinting is accurately maintained in the cell line (FIG. 2A). As expected, we derived clonal lines with either allele tagged, with the heterozygous clones uniquely displaying a bimodal distribution in GFP fluorescence (FIG. 2B). Two SNRPN-2A-GFP lines were selected that independently report on SNRPN expression from the paternal or maternal allele, respectively. These cell lines were used in subsequent CRISPR screens.

### Example 3

Identification of Allele-Specific Regulatory Elements with CRISPRa and CRISPRi Screens in SNRPN-2A-GFP hiPSCs

[0241] Parent-of-origin specific epigenetic marks within the 15q11-13 region are associated with allele-specific expression of PWS genes. Furthermore, putative cis-acting regulatory sequences have been identified within the PWS locus. CRISPR-based epigenetic editing was used to identify and reveal the function of regulatory regions that control allele-specific expression of PWS genes. Specifically, a gRNA library was designed within the 15q11-13 locus to screen for regulatory elements controlling expression of paternal or maternal SNRPN-2A-GFP (FIG. 1A, FIG. 1B, FIG. 2C).

[0242] CRISPR-based screening approaches to uncover regulatory elements found that regulatory elements were located in the proximity (i.e., within a megabase) of their target genes and were annotated with canonical markers of regulatory activity, such as DNase I hypersensitivity. However, regulatory elements may establish imprinting at early stages of differentiation and development such that the canonical signatures of the regulatory elements no longer exist. Thus, perturbation of the regulatory element function would require unbiased screening with gRNA libraries tiling the region. Consequently, the designed gRNA library consisted of a high-density region covering ˜300 kilobases (kb) centered at the PWS-IC and extending upstream to alternative SNRPN exons and downstream to the SNORD116 cluster. Additional gRNAs outside of the high-density region were designed to target putative regulatory elements throughout the remaining imprinted region based on DNase I hypersensitivity signal in human embryonic stem cells (Consortium, Nature. 2012, 489, 57-74, incorporated by reference). The full gRNA library consisted of 11.751 total gRNAs, including 531 scrambled non-targeting controls (FIG. 1B). Some gRNAs are shown in TABLE 5.

[0243] Two independent screens were performed in the paternal and maternal SNRPN-2A-GFP cell lines. A CRISPRi screen with the dCas9-KRAB repressor in paternally tagged SNRPN-2A-GFP cells (patSNRPN-2A-GFP) was performed to identify regions leading to repression of SNRPN transcription. The dCas9-KRAB repressor has been used for targeted gene repression and can function across a diversity of epigenetic contexts at promoters and distal regulatory elements. Similarly, a CRISPRa screen with the VP64-dCas9-VP64 activator in maternally tagged SNRPN-2A-GFP cells (matSNRPN-2A-GFP) was performed. The VP64 transactivation domain fused to both the N- and C-termini of dCas9 (VP64-dCas9-VP64) was used in the CRISPRa platform due to its reported broad activity across diverse chromatin contexts and its ability to initiate chromatin remodelling at the target site. In particular, the N- and C-termini double fusion significantly increases activation of endogenous genes compared to a single copy of VP64 across diverse loci and cell types. In both screens, the cells were transduced with the gRNA library at a multiplicity of infection (MOI) of 0.2 to ensure one gRNA per cell, cultured for nine days, and sorted via fluorescence-activation cell sorting (FACS) for the 10% highest and lowest GFP-expressing cells (FIG. 1C). Deep sequencing of gRNA abundance in each population followed by differential expression analysis was used to identify enriched or depleted gRNAs in GFP-high or GFP-low cells.

[0244] For the CRISPRi screen, the majority of significantly enriched or depleted gRNAs (gRNA “hits”) targeted the ˜300 kb high-density region (FIG. 1D, FIG. 2C). The CRISPRi screen of the paternal allele identified sites upstream of PWS-IC, within and downstream of the PWS-IC, and throughout the gene body of SNRPN (labelled pat1-pat8). The hits within and downstream of the SNRPN gene body had a strong DNA strand bias, with most hits located on the minus DNA strand and targeting the sense strand of the SNRPN gene (FIG. 2D), potentially indicating steric hindrance of gene transcription. Fewer hits were identified with the CRISPRa screen of the maternal allele. Two distinct clusters of gRNAs (labelled mat1 and mat2) were identified ˜100 kb upstream of the PWS-IC in the general region of annotated upstream SNRPN exons (FIG. 1D). There was no overlap in the gRNA hits between the maternal and paternal screens (FIG. 2E).

[0245] When evaluated individually, single gRNAs from the regions identified in the paternal dCas9-KRAB screen influenced GFP expression, as assessed by mean fluorescence intensity (MFI) of the GFP reporter (FIG. 3A). Rather than using single gRNAs for the initial CRISPRa validations, three or four gRNAs targeting the same region were pooled due to the reported synergistic activity of multiple gRNAs. Targeting both the mat1 and mat2 regions with VP64-dCas9-VP64 led to up-regulation of matSNRPN-2A-GFP as assessed by qRT-PCR (FIG. 1F, FIG. 2F). Individual gRNAs within each pool were validated and showed that the single best gRNAs for each region were mat1 g3 and mat2 g2, which were used for subsequent studies with VP64-dCas9-VP64 (FIG. 2F). Additionally, even though the pooled gRNAs within the mat1 region improved activation of SNRPN-GFP, the pooled gRNAs within the mat2 region appeared to have less activity on SNRPN-GFP than using mat2 g2 alone. This observation may have occurred due to the overlapping of the three mat2 gRNAs, which could hinder dCas9 binding if multiple gRNAs are present within the same cell. This was not the case with the four mat1 gRNAs.

[0246] To ensure that the lack of overlap between the maternal and paternal screens was not due to differences in sensitivity of the allele-specific GFP reporters, gRNA hits were individually tested in cells with the opposing reporter allele. Most gRNAs tested did not influence expression of the other allele (FIG. 2G, FIG. 2H). Region pat5, which overlaps the PWS-IC, exhibited a minor influence (˜20-fold) on maternal SNRPN expression with VP64-dCas9-VP64 (FIG. 2H). This level of activation was modest compared to the observed fold-change at the mat1 and mat2 regions, even with a single gRNA (FIG. 2F).

### Example 4

Activation of Paternal SNRPN-2A-GFP Through dCas9-KRAB Targeting

[0247] While most gRNA hits in the paternal screen were enriched in the GFP-low population, consistent with the expected repressive effect of dCas9-KRAB, several gRNAs within two regions, pat6 and pat8, increased the levels of measured GFP expression (FIG. 3A). These regions were both downstream of SNRPN exon 10, with pat6 directly adjacent to exon 10 and pat8 ˜10 kb further downstream (FIG. 3B). While both regions increased the MFI of the GFP reporter when targeted with dCas9-KRAB, they did not change the corresponding RNA expression measured by qRT-PCR on total RNA (FIG. 3C).

[0248] A recent study discovered that a weak polyadenylation (poly(A)) cleavage signal at the 3′ end of SNRPN enabled continued transcription of downstream ncRNAs, including SPA lncRNAs and snoRNAs. As shown herein, an up-regulation in polyadenylated SNRPN with pat6 and pat8 targeting was observed (FIG. 3D). Additionally, a down-regulation of some of the ncRNAs downstream of SNRPN, including SPA1, SPA2 and SNORD116, when targeting dCas9-KRAB to either the PWS-IC, pat6, or pat8 regions was observed (FIG. 3E). These results suggested that dCas9-KRAB targeting to the 3′ end of the SNRPN transcript may modulate polyadenylation of the host transcript and lead to changes in SNRPN protein expression without changes in transcription. Additionally, this data represents a unique application of CRISPR-based screens for alternative transcriptional termination sites.

[0249] A 3 RACE-sequencing was performed to record the distribution of UTR sequences in an unbiased fashion (FIG. 3F). There was a correlation in the abundance of SNRPN 3′ UTR sequence variants in cells treated with dCas9-KRAB and an empty gRNA vector or a gRNA targeting pat6 or pat8, indicating no change in the SNRPN 3′ UTR. The same four sequence variants were most abundantly enriched in all conditions (FIGS. 3G-3I). Therefore, targeting of dCas9-KRAB to pat6 and pat8 increased transcriptional termination and polyadenylation, but did so using the same termination sequences that function naturally in the absence of the dCas9-KRAB-mediated perturbation.

### Example 5

Additional gRNAs and Regulatory Elements Controlling Maternal SNRPN Expression Identified by a Dual gRNA Screen

[0250] Several studies have demonstrated enhanced CRISPRa activity with the delivery of multiple gRNAs functioning synergistically. Additionally, regulatory elements can function cooperatively to regulate gene expression. Therefore, simultaneous targeting of these sites may help reveal their activity. Consequently, an additional CRISPRa screen with VP64-dCas9-VP64 in matSNRPN-2A-GFP cells was performed with a dual gRNA vector, such that each cell received a pair of gRNAs. Because testing all pair-wise combinations of the original gRNA library would be too large to cover experimentally, one gRNA within the mat1 region (mat1 g3) was fixed and this fixed gRNA was paired with the 11,220 gRNA library. The screening protocol was performed identically to the original single gRNA CRISPRa screen.

[0251] The dual gRNA screen revealed several additional gRNAs and regulatory regions that were not identified in the single gRNA screen, including a region ˜5 kb upstream from mat1 and adjacent to an annotated SNRPN exon (FIG. 4A). The most significantly enriched gRNAs in the single gRNA screen were also identified in the dual screen, with the addition of several more strongly enriched gRNAs unique to the dual screen (FIG. 46).

### Example 6

### Activation of Maternal SNRPN-2A-GFP Via Targeted Demethylation

[0252] Further studies were performed to assess whether the lack of overlap between the hits from the CRISPRa and CIRSPRi screens of the maternal and paternal alleles was related to differences in the epigenetic mechanisms regulating identified elements. VP64 activates gene expression through the recruitment of epigenetic modifiers and transcriptional machinery, often establishing a more accessible chromatin environment enriched in active histone marks, such as H3K27ac and H3K4me3. However, the influence of VP64 on other chromatin modifications linked to imprinting at the 15q11-13 locus, such as DNA methylation, may not be investigated by VP64. To directly assess the role of DNA methylation in the maintenance of the maternal imprint, dCas9 fused to the catalytic domain of Ten-eleven translocation methylcytosine dioxygenase 1 (Tet1c-dCas9) was used to catalyze DNA demethylation at the target locus. This fusion can demethylate DNA in a targeted manner and induce corresponding changes in gene expression.

[0253] A screen with Tell cdCas9 was performed similarly to the screen completed with VP64-dCas9-VP64, sorting cells based on expression of matSNRPN-2A-GFP (FIG. 1C, FIG. 1D). In this case, a gRNA sub-library was designed and consisted of all the hits from the three screens performed previously, totaling 583 gRNAs including 50 scrambled non-targeting controls (FIG. 1E). The sub-library was designed to enable small-scale screens that would facilitate the testing of several different dCas9-based epigenome editing effectors, including Tet1 cdCas9, to deconstruct the contribution of various chromatin marks at the regulatory regions identified in the initial CRISPRa and CRISPRi screens.

[0254] The sub-library screen with VP64-dCas9-VP64 recovered gRNAs within the same mat1 and mat2 regions as the screen with the full library, albeit with higher sensitivity (FIG. 2C, FIG. 4C), providing validation and adding confidence to the screening methods. The screen with Tet1c-dCas9 identified gRNA hits in the PWS-IC overlapping a CpG island within SNRPN exon 1 (mat3), which were not detected with VP64-dCas9-VP64 and largely overlapped with significant hits in the pat4 region identified in the dCas9-KRAB screen (FIG. 1G, FIG. 2C, FIG. 4D). We validated 8 individual gRNA hits in the PWS-IC, which showed robust activation of matSNRPN-GFP (FIG. 1H).

### Example 7

Activation of Maternal PWS Genes in Isogenic Wild-type and PWS iPSC Lines

[0255] To assess how Tet1c-dCas9-mediated orVP64-dCas9-VP64-mediated maternal PWS gene activation compares to SNRPN expression from the paternal allele in the absence of any reporter construct, several effector-gRNA were tested combinations in isogenic wildtype (WT) iPSCs and iPSCs with a PWS Type II deletion introduced via Cas9 nuclease (FIG. 5A). As with screen validations, stable VP64-dCas9-VP64 and Tetlc-dCas9 cell lines were made via lentiviral transduction followed by antibiotic selection for the transgene cassette; then, these effector-expressing cell lines were transduced with individual gRNAs chosen from screen validations followed by antibiotic selection for the gRNA transgene cassette, and transcriptome-wide gene expression was assessed at 14 days post-transduction by total RNA-seq, as well as RT-qPCR for SNRPN and SNORD116.

[0256] VP64-dCas9-VP64 and Tet1c-dCas9 plus a single gRNA specifically activated PWS transcripts downstream of the gRNA binding sites, including SNRPN, snoRNA 116 (SNORD116) transcripts. Additionally, the SNRPN and SNORD116/115 long host transcripts (AC124312 and SNHG14) displayed minimal off-target effects (FIGS. 5B-5E). In VP64-dCas9-VP64 ΔPWS iPSCs, 8 genes outside the PWS locus were significantly differentially expressed, although the changes in expression were lower than any PWS genes (FIG. 5D). It is possible that these expression changes outside the PWS locus may be consequences of upregulation of PWS genes, as several PWS lncRNAs, including IPW in particular, are known to regulate the expression of other genes in trans. However, there is no evidence that IPW or other PWS lncRNAs regulate the differentially-expressed genes in this study. While both VP64-dCas9-VP64 and Tet1cdCas9 robustly activated maternal SNRPN, expression was approximately 5-10% of wild-type as assessed by qPCR (FIG. 5B, FIG. 5C), indicating either incomplete reactivation of SNRPN or complete reactivation in only a subset of cells. Similarly, VP64-dCas9-VP64 and Tet1c-dCas9 activated downstream transcript SNORD116 to about 10-30% of wild-type expression, with VP64-dCas9-VP64 having a stronger effect (FIG. BA, FIG. 6B). VP64-dCas9-VP64 with mat1 g3 induced transcription upstream of the PWS IC but not at canonical exon 1 of SNRPN in both WT and ΔPWS iPSCs, whereas Tet1c-dCas9 with IC g5 induced transcription at SNRPN exon 1 (FIG. 6C, FIG. 6D), as assessed by qPCR of exon junctions specific to different subsets of transcripts. In support of the conclusion that VP64 activates transcript variants initiating upstream of the PWS-IC, RNA sequencing revealed an increase in reads in the exon immediately downstream of the mat1 g3 gRNA binding site, which is not highly expressed in WT iPSCs (FIG. 7A). Notably, SNRPN transcripts initiating at upstream exons are normally expressed in neurons but not in most other somatic cell types, suggesting that VP64-dCas9-VP64 with mat1 g3 may be recapitulating cell-type specific regulation. Additionally, VP64-dCas9-VP64 at the mat1 region appears to decrease transcripts containing exon 1 in Wr cells (FIG. 6C). Thus, transcription starting at upstream exons and proceeding through the canonical promoter region on the paternal allele may disrupt normal SNRPN transcription.

[0257] In order to identify the proportion of PWS cells that express maternal SNRPN. HCR-FlowFish was used to stain for SNHG14 transcript and SNRPN transcript variant 1 induced by VP64-dCas9-VP64 and Tetlc-Cas9, respectively. As before, cells were sequentially lentivirally transduced with separate dCas9-effector and gRNA transgenes and underwent antibiotic selection for both cassettes. Two different transcripts were measured because VP64-dCas9-VP64 and Tetlc-dCas9 preferentially upregulate different transcript variants. Whereas VP64-dCas9-VP64 with either mat1 g3 or mat2 g2 gRNAs modestly increased SNHG14 transcript to low levels in most cells, Tet1c-dCas9 with gRNAs IC g5 or IC g6 completely restored SNRPN transcripts to wild-type levels in only 5% (g5) or 3% (g6) of cells (FIG. 5F, FIG. 5G, FIG. 6E, FIG. 6F). This effect was further supported by DNA methylation analysis via bisulfite sequencing (FIG. 8A, FIG. 8B), which showed that Tet1c-dCas9 reduced DNA methylation levels at a CpG-rich region within the PWS IC by approximately 5%. Taken together, these findings indicate that demethylation of the PWS-IC on the silenced maternal locus can completely restore SNRPN transcription.

[0258] ATAC-sequencing was used to assess changes in chromatin accessibility in ΔPWS iPSCs in response to VP64-dCas9-VP64 or Tet1c-dCas9. There were 6 differential peaks (p_{adj}<0.01 and log₂(fold-change) >1) between ΔPWS iPSCs with VP64-dCas9-VP64+mat1 g3 gRNA and NT gRNA, all of which were contained in the PWS locus. Five of these peaks were upstream of SNRPN, within the SNRPN host transcript SNHG14 (FIG. 8C), and the sixth peak was in the PWAR1 gene, approximately 160 kb downstream of SNRPN and within the SNHG14 host transcript that transcribes through SNORD1181115 cluster (FIG. 6G). VP64-dCas9-VP64 binding created increases chromatin accessibility at the gRNA binding site, creating an ATAC peak not detected in WT cells (FIG. 8D). Downstream of the gRNA binding site, the chromatin accessibility landscape in ΔPWS iPSCs with VP64-dCas9-VP64+mat1 g3 gRNA resembled that of WT iPSCs, albeit with smaller peaks, likely because heterogeneity in the extent of VP64-induced chromatin remodelling and/or SNRPN activation in the cell population, as indicated by the HCR-FlowFISH data (FIG. 5F). Collectively, these unbiased and comprehensive profiling assays showed that VP64-dCas9-VP64 specifically facilitates transcription and increased chromatin accessibility throughout the PWS locus in a manner that recapitulates the paternal locus of WT cells, with few off-target effects.

[0259] There were no differential chromatin accessibility peaks detected in ΔPWS iPSCs with Tet1c-dCas9+IC g5 gRNA compared to NT gRNA (FIG. 7B), although there was a slight increase in ATAC signal at the PWS-IC (FIG. 7C). However, the FlowFISH and bisulphite sequencing showed that Tet1c-dCas9 demethylated the PWS IC and activated SNRPN expression in only 5% of the cells. Collectively, these results supported a model in which targeted activation with VP64 and demethylation by Tet1c are modulating the locus through distinct epigenetic mechanisms.

### Example 8

Transient Delivery of Tet1x-dCas9 to PWS iPSCs Induces Stable, Heritable Activation of PWS Genes

[0260] Deposition of DNA methylation at a promoter by dCas9-DNMT3 can induce stable silencing of target genes either alone or in combination with KRAB. Similarly, DNA demethylation via Tet1-dCas9 can activate genes with methylation-sensitive promoters. Because PWS genes are normally expressed from the paternal allele, the maternal allele may remain transcriptionally active, and demethylation of the PWS-IC at an initial time point by transient expression of Tet1-dCas9 may sufficient to stably activate the silenced PWS locus.

[0261] In an attempt to improve the efficiency of Tet1-mediated SNRPN activation, three different Tet1 constructs via lentiviral delivery were compared: Tet1c-dCas9, SunTag Tet1c, and Tet1v4 dCas9. SunTag Tet1c uses a recruitment strategy to recruit up to 5 copies of Tet1c to a single Cas9. Tet1v4, similar to the Tet1c-dCas9, was a direct fusion of Tet1c to the N-terminus of dCas9; however, Tet1v4 used the longer 80-amino acid XTEN80 linker, compared to the 49-amino acid linker between Tet1c and dCas9 in the original construct. The latter two Tet1 systems were cloned into a lentiviral backbone and modified with selectable markers to create stably transduced cell lines. It was found that the Tet1v4 configuration most strongly activated SNRPN in ΔPWS iPSCs (FIG. 7D). The Tet1v4 was cloned into a smaller plasmid for efficient transient transfection and the existing selectable marker was replaced with Thy1.1 (CD90), a surface protein that enables robust and sensitive antibody staining to sort cells that received the transgene.

[0262] Nucleofection was used to deliver Tet1v4-dCas9-T2A-Thy1.1 (referred to here as Tet1v4-dCas9) plasmid to WT and PWS iPSCs stably expressing the gRNA (delivered via lentivirus) (FIG. 9A). The nucleofected cells were sorted at 2 days post-nucleofection on Thy1.1 reporter expression, which ensured that the assayed cells received both Tet1v4-dCas9 and gRNA. With this method, dCas9 expression in the cells was undetectable by day 8 post-nucleofection (FIG. 9B). However, SNRPN expression in the PWS iPSCs nucleofected with Tet1v4-dCas9 and IC g5 plasmids increased and remained stable through 7 weeks post nucleofection, indicating that transient expression of Tet1v4-dCas9 was sufficient to both stably and heritably reverse the silenced status of the PWS locus.

[0263] Despite perturbation in ΔPWS iPSCs, the PWS locus remained stably activated after differentiation to neurons. Approximately one-month post-nucleofection, iPSCs were differentiated to neurons via Ngn2 overexpression. At this late timepoint, dCas9 was no longer detectable in the cells. At 2-3 weeks post-differentiation, SNRPN expression was at a similar level in the iPSC-derived neurons compared to wild-type (FIG. 9C) as observed in the undifferentiated iPSCs (FIG. 6D). DNA methylation at the PWS-IC was approximately 5% lower in ΔPWS iPSC-derived neurons that had initially received Tet1v4-dCas9+IC g5 compared to NT gRNA (FIG. 9D). Furthermore, the PWS neurons that received Tet1-dCas9 and IC g5 were expressing MAGEL2 to approximately 10% of wild-type levels, which is a neuron-specific imprinted PWS transcript located 1.3 Mbp upstream of the PWS IC. NDN, another neuron-specific imprinted PWS gene located near MAGEL2, was approximately two-fold upregulated, but still well below wild-type expression levels (FIG. 9C).

### Example 9

### Discussion

[0264] In this study, CRISPR-based epigenetic screens at the 15q11-13 locus identified regulatory elements controlling expression of the SNRPN host transcript implicated in PWS. Targeting these regulatory elements with dCas9-based epigenetic editors lead to robust changes in gene expression of several candidate PWS-associated genes. This work provides compositions and methods for a therapeutic strategy for PWS by reactivating maternal gene expression at the 15q11-13 locus through targeted dCas9-based epigenetic editing.

[0265] Because the PWS locus is imprinted, fluorescent allele-specific SNRPN reporter lines were generated to enable independent analysis of maternal or paternal SNRPN gene expression. dCas9-KRAB repressed paternal SNRPN when placed throughout the promoter and gene body, except at two regions at the 3′ region of the gene that increased overall SNRPN expression. Consistent with the idea that dCas9-KRAB at the 3′ end of the gene alters polyadenylation, an increase in polyadenylated SNRPN as well as a decrease in downstream transcripts SPA1, SPA2, and SNORD116 was observed. Additionally, VP64-dCas9-VP64 less effectively activated maternal SNRPN when targeted to the canonical promoter, the PWS-IC. DNA methylation may impede activation, which could limit the effectiveness of VP64 at the methylated SNRPN promoter. However, two regions located within SNRPN upstream exons were identified that allow for upregulation of alternative SNRPN transcripts with VP64-dCas9-VP64. Targeting VP64-dCas9-VP64 to the mat1 region upstream of the SNRPN promoter activated maternal SNRPN in a DNA-methylation independent manner. In contrast, Tet1c-Cas9-mediated targeted DNA demethylation of the PWS-IC activated maternal SNRPN. Different epigenome or transcriptional modifiers may function at different regulatory elements, depending on the underlying epigenetic landscape. Initiating transcription of upstream SNRPN exons may be important for brain-specific effects, as suggested by a case of a PWS patient with an unusual deletion in the SNRPN upstream exons. Furthermore, as detailed herein, VP64-dCas9-VP84 upregulated SNORD116 more strongly than Tetlc-dCas9, possibly due to its location within the SNRPN upstream exons, which may more effectively upregulate transcripts such as SNHG14 that continue through SNRPN and into downstream PWS genes.

[0266] Transient delivery of Tet1c-Cas9 to ΔPWS iPSCs resulted in stable activation of SNRPN that persisted through neuronal differentiation. Furthermore, the imprinted gene MAGEL2 was expressed in these neurons post-differentiation, indicating that DNA methylation maintained the maternal PWS imprint. The PWS-IC is known to regulate expression of upstream neuronal transcripts. While DNA methylation-induced stable repression of a target gene has been demonstrated in several studies, removal of DNA methylation via transient delivery of a targeted DNA demethylase has not been previously explored at an endogenous imprinted locus.

[0267] Although cells that expressed both the gRNA and Tet1c-Cas9 cassettes after nucleofection were initially sorted, only a portion of that cell population expressed matSNRPN. Similarly, with lentiviral delivery of the TET1 construct and gRNA and drug selection for cells expressing both cassettes, only a subset of the cells expressed matSNRPN. There are several possible explanations for these observations. Firstly, Tet1c-Cas9 and/or gRNA expression levels may determine the efficiency of activation of the target gene, with some minimum expression threshold for successfully demethylating the PWS-IC. Therefore, variation in expression between cells may be the source of stochastic locus activation. However, lower cell viability and efficiency by nucleofection, possibly due to the large size of the Tet1c-Cas9 plasmid, and low event sort rates may decrease overall purity of the sorted population. Alternately, as iPSC populations comprise a heterogeneous cell population, it is possible that Tet1-mediated DNA demethylation was sufficient to induce SNRPN expression in a particular subset of cells, but that some cells may require perturbation of additional chromatin marks and/or transcription factors to enable a more transcriptionally permissive environment. This work builds upon other studies that have used targeted DNA demethylation editing to restore silenced gene expression in stem cells and neurons, including BDNF, FMR1, MECP2, and the imprinted Dlk1-Dio3 locus. These studies show that targeting a dCas9-TET1 fusion to the silenced gene's methylated promoter is sufficient to activate the silenced gene. In this work, there was no activation of maternal PWS genes with Tetlc-dCas9 directly in iPSC-derived neurons (data not shown). Similarly, it has been established that direct DNA methylation editing of MECP2 in neurons was only partially successful, but recruitment of the transcriptional repressor CTCF to CTCF anchor sites near the target gene improved MECP2 activation, indicating that additional barriers to transcriptional activation of these genes may be present in neurons. It is also possible that similar, further modifications to chromatin may help activate the silenced PWS locus in neurons compared to in stem cells.

[0268] Given that transient expression of Tet1c-dCas9 stably and heritably activated PWS gene expression, this work established the possibility of a one-time treatment for PWS. However, non-viral delivery of large dCas9-based effectors may be a challenge in vivo. Additionally, because PWS is a complex disorder that affects the pituitary-hypothalamic axis and manifests with several co-morbidities including sleep disturbances, improvement of symptoms may benefit from targeting multiple cell and tissue types in vivo.

[0269] Additional studies on the phenotypic effects of rescuing PWS gene expression in animal models or patient-derived organoids will be completed to further examine the potential of DNA methylation editing as a treatment for PWS. PWS patient-derived hypothalamic organoids have an impaired leptin response; these organoids may be used as a model for examining the effects of dCas9-based epigenome editing to restore PWS gene expression in a disease-relevant cell type. Further work will include direct epigenome editing of neurons to restore PWS gene expression.

[0270] The foregoing description of the specific aspects will so fully reveal the general nature of the invention that others can, by applying knowledge within the skill of the art, readily modify and/or adapt for various applications such specific aspects, without undue experimentation, without departing from the general concept of the present disclosure. Therefore, such adaptations and modifications are intended to be within the meaning and range of equivalents of the disclosed aspects, based on the teaching and guidance presented herein. It is to be understood that the phraseology or terminology herein is for the purpose of description and not of limitation, such that the terminology or phraseology of the present specification is to be interpreted by the skilled artisan in light of the teachings and guidance.

[0271] The breadth and scope of the present disclosure should not be limited by any of the above-described exemplary aspects but should be defined only in accordance with the following claims and their equivalents.

[0272] All publications, patents, patent applications, and/or other documents cited in this application are incorporated by reference in their entirety for all purposes to the same extent as if each individual publication, patent, patent application, and/or other document were individually indicated to be incorporated by reference for all purposes.

[0273] For reasons of completeness, various aspects of the invention are set out in the following numbered clauses:

[0274] Clause 1. A method of stably activating a gene or gene product within the imprinted 15q11-13 locus in a subject having Prader Willi Syndrome (PWS) or Prader-Willi-like disorder, the method comprising non-virally administering to the subject a DNA targeting system that targets a target region in the imprinted 15q11-13 locus, the DNA targeting system comprising: a Cas protein or a fusion protein, wherein the fusion protein comprises two heterologous polypeptide domains, wherein the first polypeptide domain comprises a DNA-binding protein and wherein the second polypeptide domain has an activity selected from transcription activation activity, transcription repression activity, transcription release factor activity, histone modification activity, nuclease activity, nucleic acid association activity, methylase activity, demethylase activity, acetylation activity, and deacetylation activity, wherein the Cas protein or fusion protein is targeted to the target region in the imprinted 15q11-13 locus.

[0275] Clause 2. The method of clause 1, wherein at least one component of the DNA targeting system is transiently expressed in a cell from the subject or transiently delivered to a cell from the subject.

[0276] Clause 3. The method of any one of clauses 1-2, wherein expression of a gene within the imprinted 15q11-13 locus is maintained in a cell from the subject for at least 10, at least 15, at least 20, at least 25, at least 28, at least 30, at least 35, at least 40, at least 45, at least 48, at least 50, or at least 55 days post-administration.

[0277] Clause 4. The method of any one of clauses 1-3, wherein the DNA-binding protein comprises a Cas protein, a zinc finger protein, or a transcription activator-like effector (TALE) protein.

[0278] Clause 5. The method of any one of clauses 1-4, wherein the DNA-binding protein comprises a Cas protein and the DNA targeting system further comprises one or more guide RNAs (gRNA) that binds to the target region in the imprinted 15q11-13 locus.

[0279] Clause 6. The method of any one of clauses 1-5, wherein the Cas protein comprises a Cas9 protein.

[0280] Clause 7. The method of any one of clauses 1-6, wherein the second polypeptide domain comprises VP64, VP16; GAL4; p65 subdomain (NFkB); KMT2 family transcriptional activators: hSET1A, hSET1B, MLL1 to 5, ASH1, and homologs (Trx, Trr, Ash1); KMT3 family: SYMD2, NSD1; KMT4 family: DOT1L and homologs; KDM1: LSD1/BHC110 and homologs (SpLsd1/Swm1/Saf110, Su(var)3-3); KDM3 family: JHDM2a/b; KDM4 family: JMJD2A/JHDM3A, JMJD2B, JMJD2C/GASC1, JMJD2D, and homologs (Rph1); KDM6 family: UTX, JMJD3, VP64-p65-Rta (VPR); synergistic action mediator (SAM); p300; VP160; VP64-dCas9-BFP-VP64; KAT2 family: hGCN5, PCAF, and homologs (dGCN5/PCAF, Gcn5; KAT3 family: CBP, p300 and homologs (dCBP/NEJ); KAT4: TAF1 and homologs (dTAF1); KAT5: TIP60/PLIP, and homologs; KAT6: MOZ/MYST3, MORF/MYST4, and homologs (Mst2, Sas3, CG1894); KAT7: HBO1/MYST2, and homologs (CHM, Mst2); KAT8: HMOF/MYST1, and homologs (dMOF, CG1894, Sas2, Mst2); KAT13 family: SRC1, ACTR, P160, CLOCK, and homologs; AID/Apobed deaminase family: AID; TET dioxygenase family: TET1; DEMETER glycosylase family: DME, DML1, DML2, or ROS1.

[0281] Clause 8. The method of any one of clauses 1-6, wherein the second polypeptide domain comprises KRAB, Mad mSIN3 interaction domain (SID); the ERF repressor domain (ERD); KMT1 family: SUV39H1, SUV39H2, G9A, ESET/SETBD1, and homologs (Cir4, Su(var)3-9); KMT5 family: Pr-SET7/8, SUV4-20H1, and homologs (PR-set7, Suv4-20, and Set9); KMT6: EZH2, KMT8: RIZ1, KDM4 family: JMJD2A/JHDM3A, JMJD2B, JMJ2D2C/GASC1, JMJD2D, and homologs (Rph1); KDM5 family JARID1A/RBP2, JARIDIB/PLU-1, JARID1C/SMCX, JARID1D/SMCY, and homologs (Lid, Jhn2, Jmj2); HDAC1, HDAC2, HDAC3, HDAC8, and its homologs (Rpd3, Hos1, Cir6); HDAC4, HDAC5, HDAC7, HDAC9, and its homologs (Hdal. Cir3); SIRT1, SIRT2, and its homologs (Sir2, Hst1, Hst2, Hst3, and Hst4); HDAC11, DNMT1, DNMT3a/3b, MET1, DRM3, and homologs, ZMET2, CMT1, CMT2, Laminin A, Laminin B, or CTCF.

[0282] Clause 9. The method of any one of clauses 1-8, wherein the second polypeptide domain comprises Tet1c or Tet1v4.

[0283] Clause 10. The method of any one of clauses 1-9, wherein the second polypeptide domain comprises the amino acid sequence of SEQ ID NO: 1139 or SEQ ID NO: 1166, or is encoded by a polynucleotide comprising the sequence of SEQ ID NO: 1138 or SEQ ID NO: 1167.

[0284] Clause 11. The method of any one of clauses 1-8, wherein the fusion protein comprises VP64-dCas9-VP64, dCas9-KRAB, Tet1c-dCas9, or Tet1v4-dCas9.

[0285] Clause 12. The method of any one of clauses 1-11, wherein the fusion protein comprises the amino acid sequence of SEQ ID NO: 1168 or SEQ ID NO: 1169, or is encoded by a polynucleotide comprising the sequence of SEQ ID NO: 1169 or SEQ ID NO: 1171.

[0286] Clause 13. The method of any one of clauses 1-12, wherein the target region in the imprinted 15q11-13 PWS-associated locus is on the maternal copy.

[0287] Clause 14. The method of any one of clauses 1-12, wherein the target region in the imprinted 15q11-13 PWS-associated locus is on the paternal copy.

[0288] Clause 15. The method of any one of clauses 1-14, wherein the expression of a gene or gene product within the imprinted 15q11-13 locus is increased.

[0289] Clause 16. The method of any one of clauses 1-15, wherein the gene within the imprinted 15q11-13 locus comprises SNRPN, MAGEL2, MKRN3, NDN, C150RF2, SNURF-SNRPN, SNHG14, SNORD107, SNORD64, SNORD109A, SNORD116, SNORD116@, SPA1, SPA2, 116HG, SNORD116-1 to 30, Sno-Inc RNA 1 to 5, IPW, SNORD115, SNORD115@, 115HG, SNORD115-1 to 48, SNORD109B, SNG14, or a snoRNA in the SNORD116 cluster, or a combination thereof.

[0290] Clause 17. The method of clause 16, wherein the gene within the imprinted 15q11-13 locus comprises SNRPN, SNORD116, MAGEL2, SNORD115. SPA1, and/or SPA2.

[0291] Clause 18. The method of clause 17, wherein the expression of MAGEL2 or its products is increased.

[0292] Clause 19. The method of clause 17, wherein the expression of SNORD116 or its products is increased.

[0293] Clause 20. The method of clause 17, wherein the expression of the SNRPN gene or its products is increased.

[0294] Clause 21. The method of clause 20, wherein expression of the SNRPN gene is maintained in a cell from the subject for at least 10, at least 15, at least 20, at least 25, at least 26, at least 30, at least 35, at least 40, at least 45, at least 48, at least 50, or at least 55 days post-administration.

[0295] Clause 22. The method of any one of clauses 1-21, wherein the gRNA is encoded by a polynucleotide comprising a sequence selected from SEQ ID NOs: 1148-1156 or binds to a polynucleotide comprising a sequence selected from SEQ ID NOs: 1148-1156 or comprises a sequence selected from SEQ ID NOs: 1157-1165.

[0296] Clause 23. The method of any one of clauses 5-22, wherein the DNA targeting system comprises two or more gRNAs.

[0297] Clause 24. The method of any one of clauses 1-23, wherein the subject is administered a vector comprising a polynucleotide encoding the DNA targeting system.

[0298] Clause 25. The method of clause 24, wherein the vector is a plasmid or a synthetic vector.

[0299] Clause 26. The method of clause 24, wherein the vector comprises RNA.

[0300] Clause 27. The method of clause 24, wherein the vector comprises ribonucleoprotein (RNP).

[0301] Clause 28. The method of any one of clauses 24-27, wherein the vector is a vector within a nanoparticle.

[0302] Clause 29. The method of clause 28, wherein the nanoparticle is a lipid nanoparticle or a polymeric nanoparticle.

[0303] Clause 30. A DNA targeting system that targets the imprinted 15q11-13 locus, the DNA targeting system comprising: (a) a Cas9 fusion protein, wherein the fusion protein comprises two heterologous polypeptide domains, wherein the first polypeptide domain comprises a Cas protein and the second polypeptide domain comprises Tet1, Tet1c, or Tet1v4; and (b) one or more guide RNAs (gRNA) that bind to a target region in the imprinted 15q11-13 locus.

[0304] Clause 31. The DNA targeting system of clause 30, for use in stably activating expression of a gene or gene product within the imprinted 15q11-13 locus in a subject having Prader Willi Syndrome (PWS) or Prader-Willi-like disorder.

[0305] Clause 32. An isolated polynucleotide sequence encoding the DNA targeting system of clause 30 or 31.

[0306] Clause 33. A vector comprising the isolated polynucleotide sequence of clause 32.

[0307] Clause 34. A nanoparticle comprising the DNA targeting system of clause 30 or 31, or the isolated polynucleotide sequence of clause 32, or the vector of clause 33, or a combination thereof.

[0308] Clause 35. The nanoparticle of clause 34, wherein the nanoparticle is a lipid nanoparticle or a polymeric nanoparticle.

[0309] Clause 36. A pharmaceutical composition comprising the DNA targeting system of clause 30 or 31, or the isolated polynucleotide sequence of clause 32, or the vector of clause 33, or the nanoparticle of clause 34 or 35, or a combination thereof.

SEQUENCES

| | SEQ ID | |
|---|---|---|
| gRNA name | NO | gRNA sequence |
| PWS_G.3511 | 1 | ctaagcagtggactaaggat |
| PWS_G.3549 | 2 | ctactttagattctattgta |
| PWS_G.4662 | 3 | gcagctcagaaagtgatgca |
| PWS_G.4738 | 4 | gccaggttactgattcatag |
| PWS_G.4862 | 5 | gogcactgcagcgcagacca |
| PWS_G.5117 | 6 | ggaaccagtcagaacaggtg |
| PWS_G.5706 | 7 | ggtcggcttcaggagggaag |
| PWS_G.6131 | 8 | gtggataggtgcgttcaagg |
| PWS_G.6318 | 9 | gtttcaggcctggactgggt |
| PWS_G.8738 | 10 | acagttcagggcatgagata |
| PWS_G.9414 | 11 | cagttcagggcatgagataa |
| PWS_G.10218 | 12 | gggcatgagataagggcagt |

SEQ ID NO: 13
NGG
SEQ ID NO: 14
NGA
SEQ ID NO: 15
NGAN
SEQ ID NO: 16
NGNG
SEQ ID NO: 17
NNAGAAW (W = A or T)
SEQ ID NO: 18
NAAR (R = A or G)
SEQ ID NO: 19
NNGRR (R = A or G; N can be any nucleotide residue, such as, any of A, G, C, or T)
SEQ ID NO: 20
NNGRRN (R = A or G; N can be any nucleotide residue, such as, any of A, G, C, or T)
SEQ ID NO: 21
NNGRRT (R = A or G; N can be any nucleotide residue, such as, any of A, G, C, or T)
SEQ ID NO: 22
NNGRRV (R = A or G; N can be any nucleotide residue, such as, any of A, G, C, or T)
SEQ ID NO: 23
codon optimized polynucleotide encoding S. pyogenes Cas9
atggataaaa agtacagcat cgggctggac atcggtacaa actcagtggg gtgggccgtg
attacggacg agtacaaggt accctccaaa aaatttaaag tgctgggtaa cacggacaga
cactctataa agaaaaatct tattggagcc ttgctgttcg actcaggcga gacagccgaa
gccacaaggt tgaagcggac cgccaggagg cggtatacca ggagaaagaa ccgcatatgc
tacctgcaag aaatcttcag taacgagatg gcaaaggttg acgatagctt tttccatcgc
ctggaagaat cctttcttgt tgaggaagac aagaagcacg aacggcaccc catctttggc
aatattgtcg acgaagtggc atatcacgaa aagtacccga ctatctacca cctcaggaag
aagctggtgg actctaccga taaggcggac ctcagactta tttatttggc actcgcccac
atgattaaat ttagaggaca tttcttgatc gagggcgacc tgaacccgga caacagtgac
gtcgataagc tgttcatcca acttgtgcag acctacaatc aactgttcga agaaaaccct
ataaatgctt caggagtcga cgctaaagca atcctgtccg cgcgcctctc aaaatctaga
agacttgaga atctgattgc tcagttgccc ggggaaaaga aaaatggatt gtttggcaac
ctgatcgccc tcagtctcgg actgacccca aatttcaaaa gtaacttcga cctggccgaa
gacgctaagc tccagctgtc caaggacaca tacgatgacg acctcgacaa tctgctggcc
cagattgggg atcagtacgc cgatctcttt ttggcagcaa agaacctgtc cgacgccatc
ctgttgagcg atatcttgag agtgaacacc gaaattacta aagcacccct tagcgcatct
atgatcaagc ggtacgacga gcatcatcag gatctgaccc tgctgaaggc tcttgtgagg
caacagctcc ccgaaaaata caaggaaatc ttctttgacc agagcaaaaa cggctacgct
ggctatatag atggtggggc cagtcaggag gaattctata aattcatcaa gcccattctc
gagaaaatgg acggcacaga ggagttgctg gtcaaactta acagggagga cctgctgcgg
aagcagcgga cctttgacaa cgggtctatc ccccaccaga ttcatctggg cgaactgcac
gcaatcctga ggaggcagga ggatttttat ccttttctta aagataaccg cgagaaaata
gaaaagattc ttacattcag gatcccgtac tacgtgggac ctctcgcccg gggcaattca
cggtttgcct ggatgacaag gaagtcagag gagactatta caccttggaa cttcgaagaa
gtggtggaca agggtgcatc tgcccagtct ttcatcgagc ggatgacaaa ttttgacaag
aacctcccta atgagaaggt gctgcccaaa cattctctgc tctacgagta ctttaccgtc
tacaatgaac tgactaaagt caagtacgtc accgagggaa tgaggaagcc ggcattcctt
agtggagaac agaagaaggc gattgtagac ctgttgttca agaccaacag gaaggtgact
gtgaagcaac ttaaagaaga ctactttaag aagatcgaat gttttgacag tgtggaaatt
tcaggggttg aagaccgctt caatgcgtca ttggggactt accatgatct tctcaagatc
ataaaggaca aagacttcct ggacaacgaa gaaaatgagg atattctcga agacatcgtc
ctcaccctga ccctgttcga agacagggaa atgatagaag agcgcttgaa aacctatgcc
cacctcttcg acgataaagt tatgaagcag ctgaagcgca ggagatacac aggatgggga
agattgtcaa ggaagctgat caatggaatt agggataaac agagtggcaa gaccatactg
gatttcctca aatctgatgg cttcgccaat aggaacttca tgcaactgat tcacgatgac
tctcttacct tcaaggagga cattcaaaag gctcaggtga gcgggcaggg agactccctt
catgaacaca tcgcgaattt ggcaggttcc cccgctatta aaaagggcat ccttcaaact
gtcaaggtgg tggatgaatt ggtcaaggta atgggcagac ataagccaga aaatattgtg
atcgagatgg cccgcgaaaa ccagaccaca cagaagggcc agaaaaatag tagagagcgg
atgaagagga tcgaggaggg catcaaagag ctgggatctc agattctcaa agaacacccc
gtagaaaaca cacagctgca gaacgaaaaa ttgtacttgt actatctgca gaacggcaga
gacatgtacg tcgaccaaga acttgatatt aatagactgt ccgactatga cgtagaccat
atcgtgcccc agtccttcct gaaggacgac tccattgata acaaagtctt gacaagaagc
gacaagaaca ggggtaaaag tgataatgtg cctagcgagg aggtggtgaa aaaaatgaag
aactactggc gacagctgct taatgcaaag ctcattacac aacggaagtt cgataatctg
acgaaagcag agagaggtgg cttgtctgag ttggacaagg cagggtttat taagcggcag
ctggtggaaa ctaggcagat cacaaagcac gtggcgcaga ttttggacag ccggatgaac
acaaaatacg acgaaaatga taaactgata cgagaggtca aagttatcac gctgaaaagc
aagctggtgt ccgattttcg gaaagacttc cagttctaca aagttcgcga gattaataac
taccatcatg ctcacgatgc gtacctgaac gctgttgtcg ggaccgcctt gataaagaag
tacccaaagc tggaatccga gttcgtatac ggggattaca aagtgtacga tgtgaggaaa
atgatagcca agtccgagca ggagattgga aaggccacag ctaagtactt cttttattct
aacatcatga atttttttaa gacggaaatt accctggcca acggagagat cagaaagcgg
ccccttatag agacaaatgg tgaaacaggt gaaatcgtct gggataaggg cagggatttc
gctactgtga ggaaggtgct gagtatgcca caggtaaata tcgtgaaaaa aaccgaagta
cagaccggag gattttccaa ggaaagcatt ttgcctaaaa gaaactcaga caagctcatc
gcccgcaaga aagattggga ccctaagaaa tacgggggat ttgactcacc caccgtagcc
tattctgtgc tggtggtagc taaggtggaa aaaggaaagt ctaagaagct gaagtccgtg
aaggaactct tgggaatcac tatcatggaa agatcatcct ttgaaaagaa ccctatcgat
ttcctggagg ctaagggtta caaggaggtc aagaaagacc tcatcattaa actgccaaaa
tactctctct tcgagctgga aaatggcagg aagagaatgt tggccagcgc cggagagctg
caaaagggaa acgagcttgc tctgccctcc aaatatgtta attttctcta tctcgcttcc
cactatgaaa agctgaaagg gtctcccgaa gataacgagc agaagcagct gttcgtcgaa
cagcacaagc actatctgga tgaaataatc gaacaaataa gcgagttcag caaaagggtt
atcctggcgg atgctaattt ggacaaagta ctgtctgctt ataacaagca ccgggataag
cctattaggg aacaagccga gaatataatt cacctcttta cactcacgaa tctcggagcc
cccgccgcct tcaaatactt tgatacgact atcgaccgga aacggtatac cagtaccaaa
gaggtcctcg atgccaccct catccaccag tcaattactg gcctgtacga
aacacggatcgacctctctc aactggggg cgactag
SEQ ID NO: 24
Amino acid sequence of codon optimized polynucleotide encoding S. pyogenes Cas9
MDKKYSIGLDIGTNSVGWAVITDEYKVPSKKFKVLGNTDRHSIKKNLIGALLFDSGETAEATRLKRTA
RRRYTRRKNRICYLQEIFSNEMAKVDDSFFHRLEESFLVEEDKKHERHPIFGNIVDEVAYHEKYPTIY
HLRKKLVDSTDKADLRLIYLALAHMIKFRGHFLIEGDLNPDNSDVDKLFIQLVQTYNQLFEENPINAS
GVDAKAILSARLSKSRRLENLIAQLPGEKKNGLFGNLIALSLGLTPNEKSNEDLAEDAKLQLSKDTYD
DDLDNLLAQIGDQYADLFLAAKNISDAILLSDILRVNTEITKAPLSASMIKRYDEHHQDLTLLKALVR
QQLPEKYKEIFFDQSKNGYAGYIDGGASQEEFYKFIKPILEKMDGTEELLVKLNREDLLRKQRTEDNG
SIPHQIHLGELHAILRRQEDFYPFLKDNREKIEKILTFRIPYYVGPLARGNSRFAWMTRKSEETITPW
NFEEVVDKGASAQSFIERMTNFDKNLPNEKVLPKHSLLYEYFTVYNELTKVKYVTEGMRKPAFLSGEQ
KKAIVDLLFKTNRKVTVKQLKEDYFKKIECFDSVEISGVEDRENASLGTYHDLLKIIKDKDELDNEEN
EDILEDIVLTLTLFEDREMIEERLKTYAHLEDDKVMKQLKRRRYTGWGRLSRKLINGIRDKQSGKTIL
DFLKSDGFANRNFMQLIHDDSLTFKEDIQKAQVSGQGDSLHEHIANLAGSPAIKKGILQTVKVVDELV
KVMGRHKPENIVIEMARENQTTQKGQKNSRERMKRIEEGIKELGSQILKEHPVENTQLQNEKLYLYYL
QNGRDMYVDQELDINRLSDYDVDHIVPQSFLKDDSIDNKVLTRSDKNRGKSDNVPSEEVVKKMKNYWR
QLLNAKLITQRKEDNITKAERGGLSELDKAGFIKRQLVETRQITKHVAQILDSRMNTKYDENDKLIRE
VKVITLKSKLVSDERKDFQFYKVREINNYHHAHDAYLNAVVGTALIKKYPKLESEFVYGDYKVYDVRK
MIAKSEQEIGKATAKYFFYSNIMNFFKTEITLANGEIRKRPLIETNGETGEIVWDKGRDFATVRKVLS
MPQVNIVKKTEVQTGGFSKESILPKRNSDKLIARKKDWDPKKYGGEDSPTVAYSVLVVAKVEKGKSKK
LKSVKELLGITIMERSSFEKNPIDFLEAKGYKEVKKDLIIKLPKYSLFELENGRKRMLASAGELQKGN
ELALPSKYVNFLYLASHYEKLKGSPEDNEQKQLFVEQHKHYLDEIIEQISEFSKRVILADANLDKVLS
AYNKHRDKPIREQAENIIHLFTLTNLGAPAAFKYFDTTIDRKRYTSTKEVLDATLIHQSITGLYETRI
DLSQLGGD
SEQ ID NO: 25
codon optimized nucleic acid sequences encoding S. aureus Cas9
atgaaaagga actacattct ggggctggac atcgggatta caagcgtggg gtatgggatt
attgactatg aaacaaggga cgtgatcgac gcaggcgtca gactgttcaa ggaggccaac
gtggaaaaca atgagggacg gagaagcaag aggggagcca ggcgcctgaa acgacggaga
aggcacagaa tccagagggt gaagaaactg ctgttcgatt acaacctgct gaccgaccat
tctgagctga gtggaattaa tccttatgaa gccagggtga aaggcctgag tcagaagctg
tcagaggaag agttttccgc agctctgctg cacctggcta agcgccgagg agtgcataac
gtcaatgagg tggaagagga caccggcaac gagctgtcta caaaggaaca gatctcacgc
aatagcaaag ctctggaaga gaagtatgtc gcagagctgc agctggaacg gctgaagaaa
gatggcgagg tgagagggtc aattaatagg ttcaagacaa gcgactacgt caaagaagcc
aagcagctgc tgaaagtgca gaaggcttac caccagctgg atcagagctt catcgatact
tatatcgacc tgctggagac tcggagaacc tactatgagg gaccaggaga agggagcccc
ttcggatgga aagacatcaa ggaatggtac gagatgctga tgggacattg cacctatttt
ccagaagagc tgagaagcgt caagtacgct tataacgcag atctgtacaa cgccctgaat
gacctgaaca acctggtcat caccagggat gaaaacgaga aactggaata ctatgagaag
ttccagatca tcgaaaacgt gtttaagcag aagaaaaagc ctacactgaa acagattgct
aaggagatcc tggtcaacga agaggacatc aagggctacc gggtgacaag cactggaaaa
ccagagttca ccaatctgaa agtgtatcac gatattaagg acatcacagc acggaaagaa
atcattgaga acgccgaact gctggatcag attgctaaga tcctgactat ctaccagagc
tccgaggaca tccaggaaga gctgactaac ctgaacagcg agctgaccca ggaagagatc
gaacagatta gtaatctgaa ggggtacacc ggaacacaca acctgtccct gaaagctatc
aatctgattc tggatgagct gtggcataca aacgacaatc agattgcaat ctttaaccgg
ctgaagctgg tcccaaaaaa ggtggacctg agtcagcaga aagagatccc aaccacactg
gtggacgatt tcattctgtc acccgtggtc aagcggagct tcatccagag catcaaagtg
atcaacgcca tcatcaagaa gtacggcctg cccaatgata tcattatcga gctggctagg
gagaagaaca gcaaggacgc acagaagatg atcaatgaga tgcagaaacg aaaccggcag
accaatgaac gcattgaaga gattatccga actaccggga aagagaacgc aaagtacctg
attgaaaaaa tcaagctgca cgatatgcag gagggaaagt gtctgtattc tctggaggcc
tccccctgg aggacctgct gaacaatcca ttcaactacg aggtcgatca tattatcccc
agaagcgtgt ccttcgacaa ttcctttaac aacaaggtgc tggtcaagca ggaagagaac
tctaaaaagg gcaataggac tcctttccag tacctgtcta gttcagattc caagatctct
tacgaaacct ttaaaaagca cattctgaat ctggccaaag gaaagggccg catcagcaag
accaaaaagg agtacctgct ggaagagcgg gacatcaaca gattctccgt ccagaaggat
tttattaacc ggaatctggt ggacacaaga tacgctactc gcggcctgat gaatctgctg
cgatcctatt tccgggtgaa caatctggat gtgaaagtca agtccatcaa cgggggttc
acatcttttc tgaggcgcaa atggaagttt aaaaaggagc gcaacaaagg gtacaagcac
catgccgaag atgctctgat tatcgcaaat gccgacttca tctttaagga gtggaaaaag
ctggacaaag ccaagaaagt gatggagaac cagatgttcg aagagaagca ggccgaatct
atgcccgaaa tcgagacaga acaggagtac aaggagattt tcatcactcc tcaccagatc
aagcatatca aggatttcaa ggactacaag tactctcacc gggtggataa aaagcccaac
agagagctga tcaatgacac cctgtatagt acaagaaaag acgataaggg gaataccctg
attgtgaaca atctgaacgg actgtacgac aaagataatg acaagctgaa aaagctgatc
aacaaaagtc ccgagaagct gctgatgtac caccatgatc ctcagacata tcagaaactg
aagctgatta tggagcagta cggcgacgag aagaacccac tgtataagta ctatgaagag
actgggaact acctgaccaa gtatagcaaa aaggataatg gccccgtgat caagaagatc
aagtactatg ggaacaagct gaatgcccat ctggacatca cagacgatta ccctaacagt
cgcaacaagg tggtcaagct gtcactgaag ccatacagat tcgatgtcta tctggacaac
ggcgtgtata aatttgtgac tgtcaagaat ctggatgtca tcaaaaagga gaactactat
gaagtgaata gcaagtgcta cgaagaggct aaaaagctga aaaagattag caaccaggca
gagttcatcg cctcctttta caacaacgac ctgattaaga tcaatggcga actgtatagg
gtcatcgggg tgaacaatga tctgctgaac cgcattgaag tgaatatgat tgacatcact
taccgagagt atctggaaaa catgaatgat aagcgccccc ctcgaattat caaaacaatt
gcctctaaga ctcagagtat caaaaagtac tcaaccgaca ttctgggaaa cctgtatgag
gtgaagagca aaaagcaccc tcagattatc aaaaagggc
SEQ ID NO: 26
codon optimized nucleic acid sequences encoding S. aureus Cas9
atgaagcgga actacatcct gggcctggac atcggcatca ccagcgtggg ctacggcatc
atcgactacg agacacggga cgtgatcgat gccggcgtgc ggctgttcaa agaggccaac
gtggaaaaca acgagggcag gcggagcaag agaggcgcca gaaggctgaa gcggcggagg
cggcatagaa tccagagagt gaagaagctg ctgttcgact acaacctgct gaccgaccac
agcgagctga gcggcatcaa cccctacgag gccagagtga agggcctgag ccagaagctg
agcgaggaag agttctctgc cgccctgctg cacctggcca agagaagagg cgtgcacaac
gtgaacgagg tggaagagga caccggcaac gagctgtcca ccaaagagca gatcagccgg
aacagcaagg ccctggaaga gaaatacgtg gccgaactgc agctggaacg gctgaagaaa
gacggcgaag tgcggggcag catcaacaga ttcaagacca gcgactacgt gaaagaagcc
aaacagctgc tgaaggtgca gaaggcctac caccagctgg accagagctt catcgacacc
tacatcgacc tgctggaaac ccggcggacc tactatgagg gacctggcga gggcagcccc
ttcggctgga aggacatcaa agaatggtac gagatgctga tgggccactg cacctacttc
cccgaggaac tgcggagcgt gaagtacgcc tacaacgccg acctgtacaa cgccctgaac
gacctgaaca atctcgtgat caccagggac gagaacgaga agctggaata ttacgagaag
ttccagatca tcgagaacgt gttcaagcag aagaagaagc ccaccctgaa gcagatcgcc
aaagaaatcc tcgtgaacga agaggatatt aagggctaca gagtgaccag caccggcaag
cccgagttca ccaacctgaa ggtgtaccac gacatcaagg acattaccgc ccggaaagag
attattgaga acgccgagct gctggatcag attgccaaga tcctgaccat ctaccagagc
agcgaggaca tccaggaaga actgaccaat ctgaactccg agctgaccca ggaagagatc
gagcagatct ctaatctgaa gggctatacc ggcacccaca acctgagcct gaaggccatc
aacctgatcc tggacgagct gtggcacacc aacgacaacc agatcgctat cttcaaccgg
ctgaagctgg tgcccaagaa ggtggacctg tcccagcaga aagagatccc caccaccctg
gtggacgact tcatcctgag ccccgtcgtg aagagaagct tcatccagag catcaaagtg
atcaacgcca tcatcaagaa gtacggcctg cccaacgaca tcattatcga gctggcccgc
gagaagaact ccaaggacgc ccagaaaatg atcaacgaga tgcagaagcg gaaccggcag
accaacgagc ggatcgagga aatcatccgg accaccggca aagagaacgc caagtacctg
atcgagaaga tcaagctgca cgacatgcag gaaggcaagt gcctgtacag cctggaagcc
atccctctgg aagatctgct gaacaacccc ttcaactatg aggtggacca catcatcccc
agaagcgtgt ccttcgacaa cagcttcaac aacaaggtgc tcgtgaagca ggaagaaaac
agcaagaagg gcaaccggac cccattccag tacctgagca gcagcgacag caagatcagc
tacgaaacct tcaagaagca catcctgaat ctggccaagg gcaagggcag aatcagcaag
accaagaaag agtatctgct ggaagaacgg gacatcaaca ggttctccgt gcagaaagac
ttcatcaacc ggaacctggt ggataccaga tacgccacca gaggcctgat gaacctgctg
cggagctact tcagagtgaa caacctggac gtgaaagtga agtccatcaa tggcggcttc
accagctttc tgcggcggaa gtggaagttt aagaaagagc ggaacaaggg gtacaagcac
cacgccgagg acgccctgat cattgccaac gccgatttca tcttcaaaga gtggaagaaa
ctggacaagg ccaaaaaagt gatggaaaac cagatgttcg aggaaaagca ggccgagagc
atgcccgaga tcgaaaccga gcaggagtac aaagagatct tcatcacccc ccaccagatc
aagcacatta aggacttcaa ggactacaag tacagccacc gggtggacaa gaagcctaat
agagagctga ttaacgacac cctgtactcc acccggaagg acgacaaggg caacaccctg
atcgtgaaca atctgaacgg cctgtacgac aaggacaatg acaagctgaa aaagctgatc
aacaagagcc ccgaaaagct gctgatgtac caccacgacc cccagaccta ccagaaactg
aagctgatta tggaacagta cggcgacgag aagaatcccc tgtacaagta ctacgaggaa
accgggaact acctgaccaa gtactccaaa aaggacaacg gccccgtgat caagaagatt
aagtattacg gcaacaaact gaacgcccat ctggacatca ccgacgacta ccccaacagc
agaaacaagg tcgtgaagct gtccctgaag ccctacagat tcgacgtgta cctggacaat
ggcgtgtaca agttcgtgac cgtgaagaat ctggatgtga tcaaaaaaga aaactactac
gaagtgaata gcaagtgcta tgaggaagct aagaagctga agaagatcag caaccaggcc
gagtttatcg cctccttcta caacaacgat ctgatcaaga tcaacggcga gctgtataga
gtgatcggcg tgaacaacga cctgctgaac cggatcgaag tgaacatgat cgacatcacc
taccgcgagt acctggaaaa catgaacgac aagaggcccc ccaggatcat taagacaatc
gcctccaaga cccagagcat taagaagtac agcacagaca ttctgggcaa cctgtatgaa
gtgaaatcta agaagcaccc tcagatcatc aaaaagggc
SEQ ID NO: 27
codon optimized nucleic acid sequences encoding S. aureus Cas9
atgaagcgca actacatcct cggactggac atcggcatta cctccgtggg atacggcatc
atcgattacg aaactaggga tytgatcgac gctggagtca ggctgttcaa agaggcgaac
gtggagaaca acgaggggcg gcgctcaaag aggggggccc gccggctgaa gcgccgccgc
agacatagaa tccagcgcgt gaagaagctg ctgttcgact acaaccttct gaccgaccac
tccgaacttt ccggcatcaa cccatatgag gctagagtga agggattgtc ccaaaagctg
tccgaggaag agttctccgc cgcgttgctc cacctcgcca agcgcagggg agtgcacaat
gtgaacgaag tggaagaaga taccggaaac gagctgtcca ccaaggagca gatcagccgg
aactccaagg ccctggaaga gaaatacgtg gcggaactgc aactggagcg gctgaagaaa
gacggagaag tgcgcggctc gatcaaccgc ttcaagacct cggactacgt gaaggaggcc
aagcagctcc tgaaagtgca aaaggcctat caccaacttg accagtcctt tatcgatacc
tacatcgatc tgctcgagac tcggcggact tactacgagg gtccagggga gggctcccca
tttggttgga aggatattaa ggagtggtac gaaatgctga tgggacactg cacatacttc
cctgaggagc tgcggagcgt gaaatacgca tacaacgcag acctgtacaa cgcgctgaac
gacctgaaca atctcgtgat cacccgggac gagaacgaaa agctcgagta ttacgaaaag
ttccagatta ttgagaacgt gttcaaacag aagaagaagc cgacactgaa gcagattgcc
aaggaaatcc tcgtgaacga agaggacatc aagggctatc gagtgacctc aacgggaaag
ccggagttca ccaatctgaa ggtctaccac gacatcaaag acattaccgc ccggaaggag
atcattgaga acgcggagct gttggaccag attgcgaaga ttctgaccat ctaccaatcc
tccgaggata ttcaggaaga actcaccaac ctcaacagcg aactgaccca ggaggagata
gagcaaatct ccaacctgaa gggctacacc ggaactcata acctgagcct gaaggccatc
aacttgatcc tggacgagct gtggcacacc aacgataacc agatcgctat tttcaatcgg
ctgaagctgg tccccaagaa agtggacctc tcacaacaaa aggagatccc tactaccctt
gtggacgatt tcattctgtc ccccgtggtc aagagaagct tcatacagtc aatcaaagtg
atcaatgcca ttatcaagaa atacggtctg cccaacgaca ttatcattga gctcgcccgc
gagaagaact cgaaggacgc ccagaagatg attaacgaaa tgcagaagag gaaccgacag
actaacgaac ggatcgaaga aatcatccgg accaccggga aggaaaacgc gaagtacctg
atcgaaaaga tcaagctcca tgacatgcag gaaggaaagt gtctgtactc gctggaggcc
attccgctgg aggacttgct gaacaaccct tttaactacg aagtggatca tatcattccg
aggagcgtgt cattcgacaa ttccttcaac aacaaggtcc tcgtgaagca ggaggaaaac
tcgaagaagg gaaaccgcac gccgttccag tacctgagca gcagcgactc caagatttcc
tacgaaacct tcaagaagca catcctcaac ctggcaaagg ggaagggtcg catctccaag
accaagaagg aatatctgct ggaagaaaga gacatcaaca gattctccgt gcaaaaggac
ttcatcaacc gcaacctcgt ggatactaga tacgctactc ggggtctgat gaacctcctg
agaagctact ttagagtgaa caatctggac gtgaaggtca agtcgattaa cggaggtttc
acctccttcc tgcggcgcaa gtggaagttc aagaaggaac ggaacaaggg ctacaagcac
cacgccgagg acgccctgat cattgccaac gccgacttca tcttcaaaga atggaagaaa
cttgacaagg ctaagaaggt catggaaaac cagatgttcg aagaaaagca ggccgagtct
atgcctgaaa tcgagactga acaggagtac aaggaaatct ttattacgcc acaccagatc
aaacacatca aggatttcaa ggattacaag tactcacatc gcgtggacaa aaagccgaac
agggaactga tcaacgacac cctctactcc acccggaagg atgacaaagg gaataccctc
atcgtcaaca accttaacgg cctgtacgac aaggacaacg ataagctgaa gaagctcatt
aacaagtcgc ccgaaaagtt gctgatgtac caccacgacc ctcagactta ccagaagctc
aagctgatca tggagcagta tggggacgag aaaaacccgt tgtacaagta ctacgaagaa
actgggaatt atctgactaa gtactccaag aaagataacg gccccgtgat taagaagatt
aagtactacg gcaacaagct gaacgcccat ctggacatca ccgatgacta ccctaattcc
cgcaacaagg tcgtcaagct gagcctcaag ccctaccggt ttgatgtgta ccttgacaat
ggagtgtaca agttcgtgac tgtgaagaac cttgacgtga tcaagaagga gaactactac
gaagtcaact ccaagtgcta cgaggaagca aagaagttga agaagatctc gaaccaggcc
gagttcattg cctccttcta taacaacgac ctgattaaga tcaacggcga actgtaccgc
gtcattggcg tgaacaacga tctcctgaac cgcatcgaag tgaacatgat cgacatcact
taccgggaat acctggagaa tatgaacgac aagcgcccgc cccggatcat taagactatc
gcctcaaaga cccagtcgat caagaagtac agcaccgaca tcctgggcaa cctgtacgag
gtcaaatcga agaagcaccc ccagatcatc aagaaggga
SEQ ID NO: 28
codon optimized nucleic acid sequences encoding S. aureus Cas9
atggccccaaagaagaagcggaaggtcggtatccacggagtcccagcagccaagcggaactacatcct
gggcctggacatcggcatcaccagcgtgggctacggcatcatcgactacgagacacgggacgtgatcg
atgccggcgtgcggctgttcaaagaggccaacgtggaaaacaacgagggcaggcggagcaagagaggc
gccagaaggctgaagcggcggaggcggcatagaatccagagagtgaagaagctgctgttcgactacaa
cctgctgaccgaccacagcgagctgagcggcatcaacccctacgaggccagagtgaagggcctgagcc
agaagctgagcgaggaagagttctctgccgccctgctgcacctggccaagagaagaggcgtgcacaac
gtgaacgaggtggaagaggacaccggcaacgagctgtccaccagagagcagatcagccggaacagcaa
ggccctggaagagaaatacgtggccgaactgcagctggaacggctgaagaaagacggcgaagtgcggg
gcagcatcaacagattcaagaccagcgactacgtgaaagaagccaaacagctgctgaaggtgcagaag
gcctaccaccagctggaccagagcttcatcgacacctacatcgacctgctggaaacccggcggaccta
ctatgagggacctggcgagggcagccccttcggctggaaggacatcaaagaatggtacgagatgctga
tgggccactgcacctacttccccgaggaactgcggagcgtgaagtacgcctacaacgccgacctgtac
aacgccctgaacgacctgaacaatctcgtgatcaccagggacgagaacgagaagctggaatattacga
gaagttccagatcatcgagaacgtgttcaagcagaagaagaagcccaccctgaagcagatcgccaaag
aaatcctcgtgaacgaagaggatattaagggctacagagtgaccagcaccggcaagcccgagttcacc
aacctgaaggtgtaccacgacatcaaggacattaccgcccggaaagagattattgagaacgccgagct
gctggatcagattgccaagatcctgaccatctaccagagcagcgaggacatccaggaagaactgacca
atctgaactccgagctgacccaggaagagatcgagcagatctctaatctgaagggctataccggcacc
cacaacctgagcctgaaggccatcaacctgatcctggacgagctgtggcacaccaacgacaaccagat
cgctatcttcaaccggctgaagctggtgcccaagaaggtggacctgtcccagcagaaagagatcccca
ccaccctggtggacgacttcatcctgagccccgtcgtgaagagaagcttcatccagagcatcaaagtg
atcaacgccatcatcaagaagtacggcctgcccaacgacatcattatcgagctggcccgcgagaagaa
ctccaaggacgcccagaaaatgatcaacgagatgcagaagcggaaccggcagaccaacgagcggatcg
aggaaatcatccggaccaccggcaaagagaacgccaagtacctgatcgagaagatcaagctgcacgac
atgcaggaaggcaagtgcctgtacagcctggaagccatccctctggaagatctgctgaacaacccctt
caactatgaggtggaccacatcatccccagaagcgtgtccttcgacaacagcttcaacaacaaggtgc
tcgtgaagcaggaagaaaacagcaagaagggcaaccggaccccattccagtacctgagcagcagcgac
agcaagatcagctacgaaaccttcaagaagcacatcctgaatctggccaagggcaagggcagaatcag
caagaccaagaaagagtatctgctggaagaacgggacatcaacaggttctccgtgcagaaagacttca
tcaaccggaacctggtggataccagatacgccaccagaggcctgatgaacctgctgcggagctacttc
agagtgaacaacctggacgtgaaagtgaagtccatcaatggcggcttcaccagctttctgcggcggaa
gtggaagtttaagaaagagcggaacaaggggtacaagcaccacgccgaggacgccctgatcattgcca
acgccgatttcatcttcaaagagtggaagaaactggacaaggccaaaaaagtgatggaaaaccagatg
ttcgaggaaaggcaggccgagagcatgcccgagatcgaaaccgagcaggagtacaaagagatcttcat
caccccccaccagatcaagcacattaaggacttcaaggactacaagtacagccaccgggtggacaaga
agcctaatagagagctgattaacgacaccctgtactccacccggaaggacgacaagggcaacaccctg
atcgtgaacaatctgaacggcctgtacgacaaggacaatgacaagctgaaaaagctgatcaacaagag
ccccgaaaagctgctgatgtaccaccacgacccccagacctaccagaaactgaagctgattatggaac
agtacggcgacgagaagaatcccctgtacaagtactacgaggaaaccgggaactacctgaccaagtac
tccaaaaaggacaacggccccgtgatcaagaagattaagtattacggcaacaaactgaacgcccatct
ggacatcaccgacgactaccccaacagcagaaacaaggtcgtgaagctgtccctgaagccctacagat
tcgacgtgtacctggacaatggcgtgtacaagttcgtgaccgtgaagaatctggatgtgatcaaaaaa
gaaaactactacgaagtgaatagcaagtgctatgaggaagctaagaagctgaagaagatcagcaacca
ggccgagtttatcgcctccttctacaacaacgatctgatcaagatcaacggcgagctgtatagagtga
tcggcgtgaacaacgacctgctgaaccggatcgaagtgaacatgatcgacatcacctaccgcgagtac
ctggaaaacatgaacgacaagaggccccccaggatcattaagacaatcgcctccaagacccagagcat
taagaagtacagcacagacattctgggcaacctgtatgaagtgaaatctaagaagcaccctcagatca
tcaaaaagggcaaaaggccggggccacgaaaaaggccggccaggcaaaaaagaaaaag
SEQ ID NO: 29
codon optimized nucleic acid sequences encoding S. aureus Cas9
accggtgcca ccatgtaccc atacgatgtt ccagattacg cttcgccgaa gaaaaagcgc
aaggtcgaag cgtccatgaa aaggaactac attctggggc tggacatcgg gattacaagc
gtggggtatg ggattattga ctatgaaaca agggacgtga tcgacgcagg cgtcagactg
ttcaaggagg ccaacgtgga aaacaatgag ggacggagaa gcaagagggg agccaggcgc
ctgaaacgac ggagaaggca cagaatccag agggtgaaga aactgctgtt cgattacaac
ctgctgaccg accattctga gctgagtgga attaatcctt atgaagccag ggtgaaaggc
ctgagtcaga agctgtcaga ggaagagttt tccgcagctc tgctgcacct ggctaagcgc
cgaggagtgc ataacgtcaa tgaggtggaa gaggacaccg gcaacgagct gtctacaaag
gaacagatct cacgcaatag caaagctctg gaagagaagt atgtcgcaga gctgcagctg
gaacggctga agaaagatgg cgaggtgaga gggtcaatta ataggttcaa gacaagcgac
tacgtcaaag aagccaagca gctgctgaaa gtgcagaagg cttaccacca gctggatcag
agcttcatcg atacttatat cgacctgctg gagactcgga gaacctacta tgagggacca
ggagaaggga gccccttcgg atggaaagac atcaaggaat ggtacgagat gctgatggga
cattgcacct attttccaga agagctgaga agcgtcaagt acgcttataa cgcagatct
tacaacgccc tgaatgacct gaacaacctg gtcatcacca gggatgaaaa cgagaaactg
gaatactatg agaagttcca gatcatcgaa aacgtgttta agcagaagaa aaagcctaca
ctgaaacaga ttgctaagga gatcctggtc aacgaagagg acatcaaggg ctaccgggtg
acaagcactg gaaaaccaga gttcaccaat ctgaaagtgt atcacgatat taaggacatc
acagcacgga aagaaatcat tgagaacgcc gaactgctgg atcagattgc taagatcctg
actatctacc agagctccga ggacatccag gaagagctga ctaacctgaa cagcgagctg
acccaggaag agatcgaaca gattagtaat ctgaaggggt acaccggaac acacaacctg
tccctgaaag ctatcaatct gattctggat gagctgtggc atacaaacga caatcagatt
gcaatcttta accggctgaa gctggtccca aaaaaggtgg acctgagtca gcagaaagag
atcccaacca cactggtgga cgatttcatt ctgtcacccg tggtcaagcg gagcttcatc
cagagcatca aagtgatcaa cgccatcatc aagaagtacg gcctgcccaa tgatatcatt
atcgagctgg ctagggagaa gaacagcaag gacgcacaga agatgatcaa tgagatgcag
aaacgaaacc ggcagaccaa tgaacgcatt gaagagatta tccgaactac cgggaaagag
aacgcaaagt acctgattga aaaaatcaag ctgcacgata tgcaggaggg aaagtgtctg
tattctctgg aggccatccc cctggaggac ctgctgaaca atccattcaa ctacgaggtc
gatcatatta tccccagaag cgtgtccttc gacaattcct ttaacaacaa ggtgctggtc
aagcaggaag agaactctaa aaagggcaat aggactcctt tccagtacct gtctagttca
gattccaaga tctcttacga aacctttaaa aagcacattc tgaatctggc caaaggaaag
ggccgcatca gcaagaccaa aaaggagtac ctgctggaag agcgggacat Caacagattc
tccgtccaga aggattttat taaccggaat ctggtggaca caagatacgc tactcgcggc
ctgatgaatc tgctgcgatc ctatttccgg gtgaacaatc tggatgtgaa agtcaagtcc
atcaacggcg ggttcacatc ttttctgagg cgcaaatgga agtttaaaaa ggagcgcaac
aaagggtaca agcaccatgc cgaagatgct ctgattatcg caaatgccga cttcatcttt
aaggagtgga aaaagctgga caaagccaag aaagtgatgg agaaccagat gttcgaagag
aagcaggccg aatctatgcc cgaaatcgag acagaacagg agtacaagga gattttcatc
actcctcacc agatcaagca tatcaaggat ttcaaggact acaagtactc tcaccgggtg
gataaaaagc ccaacagaga gctgatcaat gacaccctgt atagtacaag aaaagacgat
aaggggaata ccctgattgt gaacaatctg aacggactgt acgacaaaga taatgacaag
ctgaaaaagc tgatcaacaa aagtcccgag aagctgctga tgtaccacca tgatcctcag
acatatcaga aactgaagct gattatggag cagtacggcg acgagaagaa cccactgtat
aagtactatg aagagactgg gaactacctg accaagtata gcaaaaagga taatggcccc
gtgatcaaga agatcaagta ctatgggaac aagctgaatg cccatctgga catcacagac
gattacccta acagtcgcaa caaggtggtc aagctgtcac tgaagccata cagattcgat
gtctatctgg acaacggcgt gtataaattt gtgactgtca agaatctgga tgtcatcaaa
aaggagaact actatgaagt gaatagcaag tgctacgaag aggctaaaaa gctgaaaaag
attagcaacc aggcagagtt catcgcctcc ttttacaaca acgacctgat taagatcaat
ggcgaactgt atagggtcat cggggtgaac aatgatctgc tgaaccgcat tgaagtgaat
atgattgaca tcacttaccg agagtatctg gaaaacatga atgataagcg cccccctcga
attatcaaaa caattgcctc taagactcag agtatcaaaa agtactcaac cgacattctg
ggaaacctgt atgaggtgaa gagcaaaaag caccctcaga ttatcaaaaa gggctaagaa
ttc
SEQ ID NO: 30
Amino acid sequence of codon optimized nucleic acid sequences encoding S. aureus Cas9
MKRNYILGLDIGITSVGYGIIDYETRDVIDAGVRLFKEANVENNEGRRSKRGARRLKRRRRHRIQRVK
KLLEDYNLLTDHSELSGINPYEARVKGLSQKLSEEEFSAALLHLAKRRGVHNVNEVEEDTGNELSTKE
QISRNSKALEEKYVAELQLERLKKDGEVRGSINREKTSDYVKEAKQLLKVQKAYHQLDQSFIDTYIDL
LETRRTYYEGPGEGSPFGWKDIKEWYEMLMGHCTYFPEELRSVKYAYNADLYNALNDINNLVITRDEN
EKLEYYEKFQIIENVEKQKKKPTLKQIAKEILVNEEDIKGYRVTSTGKPEFTNLKVYHDIKDITARKE
IIENAELLDQIAKILTIYQSSEDIQEELTNINSELTQEEIEQISNLKGYTGTHNLSLKAINLILDELW
HTNDNQIAIFNRLKLVPKKVDLSQQKEIPTTLVDDFILSPVVKRSFIQSIKVINAIIKKYGLPNDIII
ELAREKNSKDAQKMINEMQKRNRQTNERIEEIIRTTGKENAKYLIEKIKLHDMQEGKCLYSLEAIPLE
DLLNNPFNYEVDHIIPRSVSFDNSFNNKVLVKQEENSKKGNRTPFQYLSSSDSKISYETFKKHILNLA
KGKGRISKTKKEYLLEERDINRFSVQKDFINRNLVDTRYATRGLMNLLRSYFRVNNLDVKVKSINGGF
TSFLRRKWKFKKERNKGYKHHAEDALIIANADFIFKEWKKLDKAKKVMENQMFEEKQAESMPEIETEQ
EYKEIFITPHQIKHIKDEKDYKYSHRVDKKPNRELINDTLYSTRKDDKGNTLIVNNINGLYDKDNDKL
KKLINKSPEKLLMYHHDPQTYQKLKLIMEQYGDEKNPLYKYYEETGNYLTKYSKKDNGPVIKKIKYYG
NKLNAHLDITDDYPNSRNKVVKLSLKPYRFDVYLDNGVYKFVTVKNLDVIKKENYYEVNSKCYEEAKK
LKKISNQAEFIASFYNNDLIKINGELYRVIGVNNDLLNRIEVNMIDITYREYLENMNDKRPPRIIKTI
ASKTQSIKKYSTDILGNLYEVKSKKHPQIIKKG
SEQ ID NO: 31
D10A mutant of S. aureus Cas9
atgaaaagga actacattct ggggctggcc atcgggatta caagcgtggg gtatgggatt
attgactatg aaacaaggga cgtgatcgac gcaggcgtca gactgttcaa ggaggccaac
gtggaaaaca atgagggacg gagaagcaag aggggagcca ggcgcctgaa acgacggaga
aggcacagaa tccagagggt gaagaaactg ctgttcgatt acaacctgct gaccgaccat
tctgagctga gtggaattaa tccttatgaa gccagggtga aaggcctgag tcagaagctg
tcagaggaag agttttccgc agctctgctg cacctggcta agcgccgagg agtgcataac
gtcaatgagg tggaagagga caccggcaac gagctgtcta caaaggaaca gatctcacgc
aatagcaaag ctctggaaga gaagtatgtc gcagagctgc agctggaacg gctgaagaaa
gatggcgagg tgagagggtc aattaatagg ttcaagacaa gcgactacgt caaagaagcc
aagcagctgc tgaaagtgca gaaggcttac caccagctgg atcagagctt catcgatact
tatatcgacc tgctggagac tcggagaacc tactatgagg gaccaggaga agggagcccc
ttcggatgga aagacatcaa ggaatggtac gagatgctga tgggacattg cacctatttt
ccagaagagc tgagaagcgt caagtacgct tataacgcag atctgtacaa cgccctgaat
gacctgaaca acctggtcat caccagggat gaaaacgaga aactggaata ctatgagaag
ttccagatca tcgaaaacgt gtttaagcag aagaaaaagc ctacactgaa acagattgct
aaggagatcc tggtcaacga agaggacatc aagggctacc gggtgacaag cactggaaaa
ccagagttca ccaatctgaa agtgtatcac gatattaagg acatcacagc acggaaagaa
atcattgaga acgccgaact gctggatcag attgctaaga tcctgactat ctaccagagc
tccgaggaca tccaggaaga gctgactaac ctgaacagcg agctgaccca ggaagagatc
gaacagatta gtaatctgaa ggggtacacc ggaacacaca acctgtccct gaaagctatc
aatctgattc tggatgagct gtggcataca aacgacaatc agattgcaat ctttaaccgg
ctgaagctgg tcccaaaaaa ggtggacctg agtcagcaga aagagatccc aaccacactg
gtggacgatt tcattctgtc acccgtggtc aagcggagct tcatccagag catcaaagtg
atcaacgcca tcatcaagaa gtacggcctg cccaatgata tcattatcga gctggctagg
gagaagaaca gcaaggacgc acagaagatg atcaatgaga tgcagaaacg aaaccggcag
accaatgaac gcattgaaga gattatccga actaccggga aagagaacgc aaagtacctg
attgaaaaaa tcaagctgca cgatatgcag gagggaaagt gtctgtattc tctggaggcc
atccccctgg aggacctgct gaacaatcca ttcaactacg aggtcgatca tattatcccc
agaagcgtgt ccttcgacaa ttcctttaac aacaaggtgc tggtcaagca ggaagagaac
tctaaaaagg gcaataggac tcctttccag tacctgtcta gttcagattc caagatctct
tacgaaacct ttaaaaagca cattctgaat ctggccaaag gaaagggccg catcagcaag
accaaaaagg agtacctgct ggaagagcgg gacatcaaca gattctccgt ccagaaggat
tttattaacc ggaatctggt ggacacaaga tacgctactc gcggcctgat gaatctgctg
cgatcctatt tccgggtgaa caatctggat gtgaaagtca agtccatcaa cggcgggttc
acatcttttc tgaggcgcaa atggaagttt aaaaaggagc gcaacaaagg gtacaagcac
catgccgaag atgctctgat tatcgcaaat gccgacttca tctttaagga gtggaaaaag
ctggacaaag ccaagaaagt gatggagaac cagatgttcg aagagaagca ggccgaatct
atgcccgaaa tcgagacaga acaggagtac aaggagattt tcatcactcc tcaccagatc
aagcatatca aggatttcaa ggactacaag tactctcacc gggtggataa aaagcccaac
agagagctga tcaatgacac cctgtatagt acaagaaaag acgataaggg gaataccctg
attgtgaaca atctgaacgg actgtacgac aaagataatg acaagctgaa aaagctgatc
aacaaaagtc ccgagaagct gctgatgtac caccatgatc ctcagacata tcagaaactg
aagctgatta tggagcagta cggcgacgag aagaacccac tgtataagta ctatgaagag
actgggaact acctgaccaa gtatagcaaa aaggataatg gccccgtgat caagaagatc
aagtactatg ggaacaagct gaatgcccat ctggacatca cagacgatta ccctaacagt
cgcaacaagg tggtcaagct gtcactgaag ccatacagat tcgatgtcta tctggacaac
ggcgtgtata aatttgtgac tgtcaagaat ctggatgtca tcaaaaagga gaactactat
gaagtgaata gcaagtgcta cgaagaggct aaaaagctga aaaagattag caaccaggca
gagttcatcg cctcctttta caacaacgac ctgattaaga tcaatggcga actgtatagg
gtcatcgggg tgaacaatga tctgctgaac cgcattgaag tgaatatgat tgacatcact
taccgagagt atctggaaaa catgaatgat aagcgccccc ctcgaattat caaaacaatt
gcctctaaga ctcagagtat caaaaagtac tcaaccgaca ttctgggaaa cctgtatgag
gtgaagagca aaaagcaccc tcagattatc aaaaagggc
SEQ ID NO: 32
N580A mutant of S. aureus Cas9
atgaaaagga actacattct ggggctggac atcgggatta caagcgtggg gtatgggatt
attgactatg aaacaaggga cgtgatcgac gcaggcgtca gactgttcaa ggaggccaac
gtggaaaaca atgagggacg gagaagcaag aggggagcca ggcgcctgaa acgacggaga
aggcacagaa tccagagggt gaagaaactg ctgttcgatt acaacctgct gaccgaccat
tctgagctga gtggaattaa tccttatgaa gccagggtga aaggcctgag tcagaagctg
tcagaggaag agttttccgc agctctgctg cacctggcta agcgccgagg agtgcataac
gtcaatgagg tggaagagga caccggcaac gagctgtcta caaaggaaca gatctcacgc
aatagcaaag ctctggaaga gaagtatgtc gcagagctgc agctggaacg gctgaagaaa
gatggcgagg tgagagggtc aattaatagg ttcaagacaa gcgactacgt caaagaagcc
aagcagctgc tgaaagtgca gaaggcttac caccagctgg atcagagctt catcgatact
tatatcgacc tgctggagac tcggagaacc tactatgagg gaccaggaga agggagcccc
ttcggatgga aagacatcaa ggaatggtac gagatgctga tgggacattg cacctatttt
ccagaagagc tgagaagcgt caagtacgct tataacgcag atctgtacaa cgccctgaat
gacctgaaca acctggtcat caccagggat gaaaacgaga aactggaata ctatgagaag
ttccagatca tcgaaaacgt gtttaagcag aagaaaaagc ctacactgaa acagattgct
aaggagatcc tggtcaacga agaggacatc aagggctacc gggtgacaag cactggaaaa
ccagagttca ccaatctgaa agtgtatcac gatattaagg acatcacagc acggaaagaa
atcattgaga acgccgaact gctggatcag attgctaaga tcctgactat ctaccagagc
tccgaggaca tccaggaaga gctgactaac ctgaacagcg agctgaccca ggaagagatc
gaacagatta gtaatctgaa ggggtacacc ggaacacaca acctgtccct gaaagctatc
aatctgattc tggatgagct gtggcataca aacgacaatc agattgcaat ctttaaccgg
ctgaagctgg tcccaaaaaa ggtggacctg agtcagcaga aagagatccc aaccacactg
gtggacgatt tcattctgtc acccgtggtc aagcggagct tcatccagag catcaaagtg
atcaacgcca tcatcaagaa gtacggcctg cccaatgata tcattatcga gctggctagg
gagaagaaca gcaaggacgc acagaagatg atcaatgaga tgcagaaacg aaaccggcag
accaatgaac gcattgaaga gattatccga actaccggga aagagaacgc aaagtacctg
attgaaaaaa tcaagctgca cgatatgcag gagggaaagt gtctgtattc tctggaggcc
atccccctgg aggacctgct gaacaatcca ttcaactacg aggtcgatca tattatcccc
agaagcgtgt ccttcgacaa ttcctttaac aacaaggtgc tggtcaagca ggaagaggcc
tctaaaaagg gcaataggac tcctttccag tacctgtcta gttcagattc caagatctct
tacgaaacct ttaaaaagca cattctgaat ctggccaaag gaaagggccg catcagcaag
accaaaaagg agtacctgct ggaagagcgg gacatcaaca gattctccgt ccagaaggat
tttattaacc ggaatctggt ggacacaaga tacgctactc gcggcctgat gaatctgctg
cgatcctatt tccgggtgaa caatctggat gtgaaagtca agtccatcaa cggcgggttc
acatcttttc tgaggcgcaa atggaagttt aaaaaggagc gcaacaaagg gtacaagcac
catgccgaag atgctctgat tatcgcaaat gccgacttca tctttaagga gtggaaaaag
ctggacaaag ccaagaaagt gatggagaac cagatgttcg aagagaagca ggccgaatct
atgcccgaaa tcgagacaga acaggagtac aaggagattt tcatcactcc tcaccagatc
aagcatatca aggatttcaa ggactacaag tactctcacc gggtggataa aaagcccaac
agagagctga tcaatgacac cctgtatagt acaagaaaag acgataaggg gaataccctg
attgtgaaca atctgaacgg actgtacgac aaagataatg acaagctgaa aaagctgatc
aacaaaagtc ccgagaagct gctgatgtac caccatgatc ctcagacata tcagaaactg
aagctgatta tggagcagta cggcgacgag aagaacccac tgtataagta ctatgaagag
actgggaact acctgaccaa gtatagcaaa aaggataatg gccccgtgat caagaagatc
aagtactatg ggaacaagct gaatgcccat ctggacatca cagacgatta ccctaacagt
cgcaacaagg tggtcaagct gtcactgaag ccatacagat tcgatgtcta tctggacaac
ggcgtgtata aatttgtgac tgtcaagaat ctggatgtca tcaaaaagga gaactactat
gaagtgaata gcaagtgcta cgaagaggct aaaaagctga aaaagattag caaccaggca
gagttcatcg cctcctttta caacaacgac ctgattaaga tcaatggcga actgtatagg
gtcatcgggg tgaacaatga tctgctgaac cgcattgaag tgaatatgat tgacatcact
taccgagagt atctggaaaa catgaatgat aagcgccccc ctcgaattat caaaacaatt
gcctctaaga ctcagagtat caaaaagtac tcaaccgaca ttctgggaaa cctgtatgag
gtgaagagca aaaagcaccc tcagattatc aaaaagggc
SEQ ID NO: 33
NGGNG
SEQ ID NO: 34
codon optimized nucleic acid sequences encoding S. aureus Cas9
atggccccaaagaagaagcggaaggtcggtatccacggagtcccagcagccaagcggaactacatcct
gggcctggacatcggcatcaccagcgtgggctacggcatcatcgactacgagacacgggacgtgatcg
atgccggcgtgcggctgttcaaagaggccaacgtggaaaacaacgagggcaggcggagcaagagaggc
gccagaaggctgaagcggcggaggcggcatagaatccagagagtgaagaagctgctgttcgactacaa
cctgctgaccgaccacagcgagctgagcggcatcaacccctacgaggccagagtgaagggcctgagcc
agaagctgagcgaggaagagttctctgccgccctgctgcacctggccaagagaagaggcgtgcacaac
gtgaacgaggtggaagaggacaccggcaacgagctgtccaccaaagagcagatcagccggaacagcaa
ggccctggaagagaaatacgtggccgaactgcagctggaacggctgaagaaagacggcgaagtgcggg
gcagcatcaacagattcaagaccagcgactacgtgaaagaagccaaacagctgctgaaggtgcagaag
gcctaccaccagctggaccagagcttcatcgacacctacatcgacctgctggaaacccggcggaccta
ctatgagggacctggcgagggcagccccttcggctggaaggacatcaaagaatggtacgagatgctga
tgggccactgcacctacttccccgaggaactgcggagcgtgaagtacgcctacaacgccgacctgtac
aacgccctgaacgacctgaacaatctcgtgatcaccagggacgagaacgagaagctggaatattacga
gaagttccagatcatcgagaacgtgttcaagcagaagaagaagcccaccctgaagcagatcgccaaag
aaatcctcgtgaacgaagaggatattaagggctacagagtgaccagcaccggcaagcccgagttcacc
aacctgaaggtgtaccacgacatcaaggacattaccgcccggaaagagattattgagaacgccgagct
gctggatcagattgccaagatcctgaccatctaccagagcagcgaggacatccaggaagaactgacca
atctgaactccgagctgacccaggaagagatcgagcagatctctaatctgaagggctataccggcacc
cacaacctgagcctgaaggccatcaacctgatcctggacgagctgtggcacaccaacgacaaccagat
cgctatcttcaaccggctgaagctggtgcccaagaaggtggacctgtcccagcagaaagagatcccca
ccaccctggtggacgacttcatcctgagccccgtcgtgaagagaagcttcatccagagcatcaaagtg
atcaacgccatcatcaagaagtacggcctgcccaacgacatcattatcgagctggcccgcgagaagaa
ctccaaggacgcccagaaaatgatcaacgagatgcagaagcggaaccggcagaccaacgagcggatcg
aggaaatcatccggaccaccggcaaagagaacgccaagtacctgatcgagaagatcaagctgcacgac
atgcaggaaggcaagtgcctgtacagcctggaagccatccctctggaagatctgctgaacaacccctt
caactatgaggtggaccacatcatccccagaagcgtgtccttcgacaacagcttcaacaacaaggtgc
tcgtgaagcaggaagaaaacagcaagaagggcaaccggaccccattccagtacctgagcagcagcgac
agcaagatcagctacgaaaccttcaagaagcacatcctgaatctggccaagggcaagggcagaatcag
caagaccaagaaagagtatctgctggaagaacgggacatcaacaggttctccgtgcagaaagacttca
tcaaccggaacctggtggataccagatacgccaccagaggcctgatgaacctgctgcggagctacttc
agagtgaacaacctggacgtgaaagtgaagtccatcaatggcggcttcaccagctttctgcggcggaa
gtggaagtttaagaaagagcggaacaaggggtacaagcaccacgccgaggacgccctgatcattgcca
acgccgatttcatcttcaaagagtggaagaaactggacaaggccaaaaaagtgatggaaaaccagatg
ttcgaggaaaagcaggccgagagcatgcccgagatcgaaaccgagcaggagtacaaagagatcttcat
caccccccaccagatcaagcacattaaggacttcaaggactacaagtacagccaccgggtggacaaga
agcctaatagagagctgattaacgacaccctgtactccacccggaaggacgacaagggcaacaccctg
atcgtgaacaatctgaacggcctgtacgacaaggacaatgacaagctgaaaaagctgatcaacaagag
ccccgaaaagctgctgatgtaccaccacgacccccagacctaccagaaactgaagctgattatggaac
agtacggcgacgagaagaatcccctgtacaagtactacgaggaaaccgggaactacctgaccaagtac
tccaaaaaggacaacggccccgtgatcaagaagattaagtattacggcaacaaactgaacgcccatct
ggacatcaccgacgactaccccaacagcagaaacaaggtcgtgaagctgtccctgaagccctacagat
tcgacgtgtacctggacaatggcgtgtacaagttcgtgaccgtgaagaatctggatgtgatcaaaaaa
gaaaactactacgaagtgaatagcaagtgctatgaggaagctaagaagctgaagaagatcagcaacca
ggccgagtttatcgcctccttctacaacaacgatctgatcaagatcaacggcgagctgtatagagtga
tcggcgtgaacaacgacctgctgaaccggatcgaagtgaacatgatcgacatcacctaccgcgagtac
ctggaaaacatgaacgacaagaggccccccaggatcattaagacaatcgcctccaagacccagagcat
taagaagtacagcacagacattctgggcaacctgtatgaagtgaaatctaagaagcaccctcagatca
tcaaaaagggcaaaaggccggcggccacgaaaaaggccggccaggcaaaaaagaaaaag
SEQ ID NO: 35
codon optimized nucleic acid sequences encoding S. aureus Cas9
aagcggaactacatcctgggcctggacatcggcatcaccagcgtgggctacggcatcatcgactacga
gacacgggacgtgatcgatgccggcgtgcggctgttcaaagaggccaacgtggaaaacaacgagggca
ggcggagcaagagaggcgccagaaggctgaagcggcggaggcggcatagaatccagagagtgaagaag
ctgctgttcgactacaacctgctgaccgaccacagcgagctgagcggcatcaacccctacgaggccag
agtgaagggcctgagccagaagctgagcgaggaagagttctctgccgccctgctgcacctggccaaga
gaagaggcgtgcacaacgtgaacgaggtggaagaggacaccggcaacgagctgtccaccaaagagcag
atcagccggaacagcaaggccctggaagagaaatacgtggccgaactgcagctggaacggctgaagaa
agacggcgaagtgcggggcagcatcaacagattcaagaccagcgactacgtgaaagaagccaaacagc
tgctgaaggtgcagaaggcctaccaccagctggaccagagcttcatcgacacctacatcgacctgctg
gaaacccggcggacctactatgagggacctggcgagggcagccccttcggctggaaggacatcaaaga
atggtacgagatgctgatgggccactgcacctacttccccgaggaactgcggagcgtgaagtacgcct
acaacgccgacctgtacaacgccctgaacgacctgaacaatctcgtgatcaccagggacgagaacgag
aagctggaatattacgagaagttccagatcatcgagaacgtgttcaagcagaagaagaagcccaccct
gaagcagatcgccaaagaaatcctcgtgaacgaagaggatattaagggctacagagtgaccagcaccg
gcaagcccgagttcaccaacctgaaggtgtaccacgacatcaaggacattaccgcccggaaagagatt
attgagaacgccgagctgctggatcagattgccaagatcctgaccatctaccagagcagcgaggacat
ccaggaagaactgaccaatctgaactccgagctgacccaggaagagatcgagcagatctctaatctga
agggctataccggcacccacaacctgagcctgaaggccatcaacctgatcctggacgagctgtggcac
accaacgacaaccagatcgctatcttcaaccggctgaagctggtgcccaagaaggtggacctgtccca
gcagaaagagatccccaccaccctggtggacgacttcatcctgagccccgtcgtgaagagaagcttca
tccagagcatcaaagtgatcaacgccatcatcaagaagtacggcctgcccaacgacatcattatcgag
ctggcccgcgagaagaactccaaggacgcccagaaaatgatcaacgagatgcagaagcggaaccggca
gaccaacgagcggatcgaggaaatcatccggaccaccggcaaagagaacgccaagtacctgatcgaga
agatcaagctgcacgacatgcaggaaggcaagtgcctgtacagcctggaagccatccctctggaagat
ctgctgaacaaccccttcaactatgaggtggaccacatcatccccagaagcgtgtccttcgacaacag
cttcaacaacaaggtgctcgtgaagcaggaagaaaacagcaagaagggcaaccggaccccattccagt
acctgagcagcagcgacagcaagatcagctacgaaaccttcaagaagcacatcctgaatctggccaag
ggcaagggcagaatcagcaagaccaagaaagagtatctgctggaagaacgggacatcaacaggttctc
cgtgcagaaagacttcatcaaccggaacctggtggataccagatacgccaccagaggcctgatgaacc
tgctgcggagctacttcagagtgaacaacctggacgtgaaagtgaagtccatcaatggcggcttcacc
agctttctgcggcggaagtggaagtttaagaaagagcggaacaaggggtacaagcaccacgccgagga
cgccctgatcattgccaacgccgatttcatcttcaaagagtggaagaaactggacaaggccaaaaaag
tgatggaaaaccagatgttcgaggaaaagcaggccgagagcatgcccgagatcgaaaccgagcaggag
tacaaagagatcttcatcaccccccaccagatcaagcacattaaggacttcaaggactacaagtacag
ccaccgggtggacaagaagcctaatagagagctgattaacgacaccctgtactccacccggaaggacg
acaagggcaacaccctgatcgtgaacaatctgaacggcctgtacgacaaggacaatgacaagctgaaa
aagctgatcaacaagagccccgaaaagctgctgatgtaccaccacgacccccagacctaccagaaact
gaagctgattatggaacagtacggcgacgagaagaatcccctgtacaagtactacgaggaaaccggga
actacctgaccaagtactccaaaaaggacaacggccccgtgatcaagaagattaagtattacggcaac
aaactgaacgcccatctggacatcaccgacgactaccccaacagcagaaacaaggtcgtgaagctgtc
cctgaagccctacagattcgacgtgtacctggacaatggcgtgtacaagttcgtgaccgtgaagaatc
tggatgtgatcaaaaaagaaaactactacgaagtgaatagcaagtgctatgaggaagctaagaagctg
aagaagatcagcaaccaggccgagtttatcgcctccttctacaacaacgatctgatcaagatcaacgg
cgagctgtatagagtgatcggcgtgaacaacgacctgctgaaccggatcgaagtgaacatgatcgaca
tcacctaccgcgagtacctggaaaacatgaacgacaagaggccccccaggatcattaagacaatcgcc
tccaagacccagagcattaagaagtacagcacagacattctgggcaacctgtatgaagtgaaatctaa
gaagcaccctcagatcatcaaaaagggc
SEQ ID NO: 36
Amino acid sequence of codon optimized nucleic acid sequences encoding S. aureus Cas9
KRNYILGLDIGITSVGYGIIDYETRDVIDAGVRLFKEANVENNEGRRSKRGARRLKRRRRHRIQRVKK
LLFDYNLLTDHSELSGINPYEARVKGLSQKLSEEEFSAALLHLAKRRGVHNVNEVEEDTGNELSTKEQ
ISRNSKALEEKYVAELQLERLKKDGEVRGSINRFKTSDYVKEAKQLLKVQKAYHQLDQSFIDTYIDLL
ETRRTYYEGPGEGSPFGWKDIKEWYEMLMGHCTYFPEELRSVKYAYNADLYNALNDLNNLVITRDENE
KLEYYEKFQIIENVFKQKKKPTLKQIAKEILVNEEDIKGYRVTSTGKPEFTNLKVYHDIKDITARKEI
IENAELLDQIAKILTIYQSSEDIQEELTNINSELTQEEIEQISNLKGYTGTHNLSLKAINLILDELWH
TNDNQIAIFNRLKLVPKKVDLSQQKEIPTTLVDDFILSPVVKRSFIQSIKVINAIIKKYGLPNDIIIE
LAREKNSKDAQKMINEMQKRNRQTNERIEEIIRTTGKENAKYLIEKIKLHDMQEGKCLYSLEAIPLED
LLNNPFNYEVDHIIPRSVSFDNSFNNKVLVKQEENSKKGNRTPFQYLSSSDSKISYETFKKHILNLAK
GKGRISKTKKEYLLEERDINRFSVQKDFINRNLVDTRYATRGLMNLLRSYFRVNNLDVKVKSINGGFT
SFLRRKWKFKKERNKGYKHHAEDALIIANADFIFKEWKKLDKAKKVMENQMFEEKQAESMPEIETEQE
YKEIFITPHQIKHIKDEKDYKYSHRVDKKPNRELINDTLYSTRKDDKGNTLIVNNINGLYDKDNDKLK
KLINKSPEKLLMYHHDPQTYQKLKLIMEQYGDEKNPLYKYYEETGNYLTKYSKKDNGPVIKKIKYYGN
KINAHLDITDDYPNSRNKVVKLSLKPYRFDVYLDNGVYKFVTVKNLDVIKKENYYEVNSKCYEEAKKL
KKISNQAEFIASFYNNDLIKINGELYRVIGVNNDLLNRIEVNMIDITYREYLENMNDKRPPRIIKTIA
SKTQSIKKYSTDILGNLYEVKSKKHPQIIKKG
SEQ ID NO: 37
Vector (pDO242) encoding codon optimized nucleic acid sequences encoding S. aureus
Cas9
ctaaattgtaagcgttaatattttgttaaaattcgcgttaaatttttgttaaatcagctcatttttta
accaataggccgaaatcggcaaaatcccttataaatcaaaagaatagaccgagatagggttgagtgtt
gttccagtttggaacaagagtccactattaaagaacgtggactccaacgtcaaagggcgaaaaaccgt
ctatcagggcgatggcccactacgtgaaccatcaccctaatcaagttttttggggtcgaggtgccgta
aagcactaaatcggaaccctaaagggagcccccgatttagagcttgacggggaaagccggcgaacgtg
gcgagaaaggaagggaagaaagcgaaaggagcgggcgctagggcgctggcaagtgtagcggtcacgct
gcgcgtaaccaccacacccgccgcgcttaatgcgccgctacagggcgcgtcccattcgccattcaggc
tgcgcaactgttgggaagggcgatcggtgcgggcctcttcgctattacgccagctggcgaaaggggga
tgtgctgcaaggcgattaagttgggtaacgccagggttttcccagtcacgacgttgtaaaacgacggc
cagtgagcgcgcgtaatacgactcactatagggcgaattgggtacCtttaattctagtactatgcaTg
cgttgacattgattattgactagttattaatagtaatcaattacggggtcattagttcatagcccata
tatggagttccgcgttacataacttacggtaaatggcccgcctggctgaccgcccaacgacccccgcc
cattgacgtcaataatgacgtatgttcccatagtaacgccaatagggactttccattgacgtcaatgg
gtggagtatttacggtaaactgcccacttggcagtacatcaagtgtatcatatgccaagtacgccccc
tattgacgtcaatgacggtaaatggcccgcctggcattatgcccagtacatgaccttatgggactttc
ctacttggcagtacatctacgtattagtcatcgctattaccatggtgatgcggttttggcagtacatc
aatgggcgtggatagcggtttgactcacggggatttccaagtctccaccccattgacgtcaatgggag
tttgttttggcaccaaaatcaacgggactttccaaaatgtcgtaacaactccgccccattgacgcaaa
tgggcggtaggcgtgtacggtgggaggtctatataagcagagctctctggctaactaccggtgccacc
ATGAAAAGGAACTACATTCTGGGGCTGGACATCGGGATTACAAGCGTGGGGTATGGGATTATTGACTA
TGAAACAAGGGACGTGATCGACGCAGGCGTCAGACTGTTCAAGGAGGCCAACGTGGAAAACAATGAGG
GACGGAGAAGCAAGAGGGGAGCCAGGCGCCTGAAACGACGGAGAAGGCACAGAATCCAGAGGGTGAAG
AAACTGCTGTTCGATTACAACCTGCTGACCGACCATTCTGAGCTGAGTGGAATTAATCCTTATGAAGC
CAGGGTGAAAGGCCTGAGTCAGAAGCTGTCAGAGGAAGAGTTTTCCGCAGCTCTGCTGCACCTGGCTA
AGCGCCGAGGAGTGCATAACGTCAATGAGGTGGAAGAGGACACCGGCAACGAGCTGTCTACAAAGGAA
CAGATCTCACGCAATAGCAAAGCTCTGGAAGAGAAGTATGTCGCAGAGCTGCAGCTGGAACGGCTGAA
GAAAGATGGCGAGGTGAGAGGGTCAATTAATAGGTTCAAGACAAGCGACTACGTCAAAGAAGCCAAGC
AGCTGCTGAAAGTGCAGAAGGCTTACCACCAGCTGGATCAGAGCTTCATCGATACTTATATCGACCTG
CTGGAGACTCGGAGAACCTACTATGAGGGACCAGGAGAAGGGAGCCCCTTCGGATGGAAAGACATCAA
GGAATGGTACGAGATGCTGATGGGACATTGCACCTATTTTCCAGAAGAGCTGAGAAGCGTCAAGTACG
CTTATAACGCAGATCTGTACAACGCCCTGAATGACCTGAACAACCTGGTCATCACCAGGGATGAAAAC
GAGAAACTGGAATACTATGAGAAGTTCCAGATCATCGAAAACGTGTTTAAGCAGAAGAAAAAGCCTAC
ACTGAAACAGATTGCTAAGGAGATCCTGGTCAACGAAGAGGACATCAAGGGCTACCGGGTGACAAGCA
CTGGAAAACCAGAGTTCACCAATCTGAAAGTGTATCACGATATTAAGGACATCACAGCACGGAAAGAA
ATCATTGAGAACGCCGAACTGCTGGATCAGATTGCTAAGATCCTGACTATCTACCAGAGCTCCGAGGA
CATCCAGGAAGAGCTGACTAACCTGAACAGCGAGCTGACCCAGGAAGAGATCGAACAGATTAGTAATC
TGAAGGGGTACACCGGAACACACAACCTGTCCCTGAAAGCTATCAATCTGATTCTGGATGAGCTGTGG
CATACAAACGACAATCAGATTGCAATCTTTAACCGGCTGAAGCTGGTCCCAAAAAAGGTGGACCTGAG
TCAGCAGAAAGAGATCCCAACCACACTGGTGGACGATTTCATTCTGTCACCCGTGGTCAAGCGGAGCT
TCATCCAGAGCATCAAAGTGATCAACGCCATCATCAAGAAGTACGGCCTGCCCAATGATATCATTATC
GAGCTGGCTAGGGAGAAGAACAGCAAGGACGCACAGAAGATGATCAATGAGATGCAGAAACGAAACCG
GCAGACCAATGAACGCATTGAAGAGATTATCCGAACTACCGGGAAAGAGAACGCAAAGTACCTGATTG
AAAAAATCAAGCTGCACGATATGCAGGAGGGAAAGTGTCTGTATTCTCTGGAGGCCATCCCCCTGGAG
GACCTGCTGAACAATCCATTCAACTACGAGGTCGATCATATTATCCCCAGAAGCGTGTCCTTCGACAA
TTCCTTTAACAACAAGGTGCTGGTCAAGCAGGAAGAGAACTCTAAAAAGGGCAATAGGACTCCTTTCC
AGTACCTGTCTAGTTCAGATTCCAAGATCTCTTACGAAACCTTTAAAAAGCACATTCTGAATCTGGCC
AAAGGAAAGGGCCGCATCAGCAAGACCAAAAAGGAGTACCTGCTGGAAGAGCGGGACATCAACAGATT
CTCCGTCCAGAAGGATTTTATTAACCGGAATCTGGTGGACACAAGATACGCTACTCGCGGCCTGATGA
ATCTGCTGCGATCCTATTTCCGGGTGAACAATCTGGATGTGAAAGTCAAGTCCATCAACGGCGGGTTC
ACATCTTTTCTGAGGCGCAAATGGAAGTTTAAAAAGGAGCGCAACAAAGGGTACAAGCACCATGCCGA
AGATGCTCTGATTATCGCAAATGCCGACTTCATCTTTAAGGAGTGGAAAAAGCTGGACAAAGCCAAGA
AAGTGATGGAGAACCAGATGTTCGAAGAGAAGCAGGCCGAATCTATGCCCGAAATCGAGACAGAACAG
GAGTACAAGGAGATTTTCATCACTCCTCACCAGATCAAGCATATCAAGGATTTCAAGGACTACAAGTA
CTCTCACCGGGTGGATAAAAAGCCCAACAGAGAGCTGATCAATGACACCCTGTATAGTACAAGAAAAG
ACGATAAGGGGAATACCCTGATTGTGAACAATCTGAACGGACTGTACGACAAAGATAATGACAAGCTG
AAAAAGCTGATCAACAAAAGTCCCGAGAAGCTGCTGATGTACCACCATGATCCTCAGACATATCAGAA
ACTGAAGCTGATTATGGAGCAGTACGGCGACGAGAAGAACCCACTGTATAAGTACTATGAAGAGACTG
GGAACTACCTGACCAAGTATAGCAAAAAGGATAATGGCCCCGTGATCAAGAAGATCAAGTACTATGGG
AACAAGCTGAATGCCCATCTGGACATCACAGACGATTACCCTAACAGTCGCAACAAGGTGGTCAAGCT
GTCACTGAAGCCATACAGATTCGATGTCTATCTGGACAACGGCGTGTATAAATTTGTGACTGTCAAGA
ATCTGGATGTCATCAAAAAGGAGAACTACTATGAAGTGAATAGCAAGTGCTACGAAGAGGCTAAAAAG
CTGAAAAAGATTAGCAACCAGGCAGAGTTCATCGCCTCCTTTTACAACAACGACCTGATTAAGATCAA
TGGCGAACTGTATAGGGTCATCGGGGTGAACAATGATCTGCTGAACCGCATTGAAGTGAATATGATTG
ACATCACTTACCGAGAGTATCTGGAAAACATGAATGATAAGCGCCCCCCTCGAATTATCAAAACAATT
GCCTCTAAGACTCAGAGTATCAAAAAGTACTCAACCGACATTCTGGGAAACCTGTATGAGGTGAAGAG
CAAAAAGCACCCTCAGATTATCAAAAAGGGCagcggaggcaagcgtcctgctgctactaagaaagctg
gtcaagctaagaaaaagaaaggatcctacccatacgatgttccagattacgcttaagaattcctagag
ctcgctgatcagcctcgactgtgccttctagttgccagccatctgttgtttgcccctcccccgtgcct
tccttgaccctggaaggtgccactcccactgtcctttcctaataaaatgaggaaattgcatcgcattg
tctgagtaggtgtcattctattctggggggtygggtggggcaggacagcaagggggaggattgggaag
agaatagcaggcatgctggggaggtagcggccgcCCgcggtggagctccagcttttgttccctttagt
gagggttaattgcgcgcttggcgtaatcatggtcatagctgtttcctgtgtgaaattgttatccgctc
acaattccacacaacatacgagccggaagcataaagtgtaaagcctggggtgcctaatgagtgagcta
actcacattaattgcgttgcgctcactgcccgctttccagtcgggaaacctgtcgtgccagctgcatt
aatgaatcggccaacgcgcggggagaggcggtttgcgtattgggcgctcttccgcttcctcgctcact
gactcgctgcgctcggtcgttcggctgcggcgagcggtatcagctcactcaaaggcggtaatacggtt
atccacagaatcaggggataacgcaggaaagaacatgtgagcaaaaggccagcaaaaggccaggaacc
gtaaaaaggccgcgttgctggcgtttttccataggctccgcccccctgacgagcatcacaaaaatcga
cgctcaagtcagaggtggcgaaacccgacaggactataaagataccaggcgtttccccctggaagctc
cctcgtgcgctctcctgttccgaccctgccgcttaccggatacctgtccgcctttctcccttcgggaa
gcgtggcgctttctcatagctcacgctgtaggtatctcagttcggtgtaggtcgttcgctccaagctg
ggctgtgtgcacgaaccccccgttcagcccgaccgctgcgccttatccggtaactatcgtcttgagtc
caacccggtaagacacgacttatcgccactggcagcagccactggtaacaggattagcagagcgaggt
atgtaggcggtgctacagagttcttgaagtggtggcctaactacggctacactagaaggacagtattt
ggtatctgcgctctgctgaagccagttaccttcggaaaaagagttggtagctcttgatccggcaaaca
aaccaccgctggtagcggtggtttttttgtttgcaagcagcagattacgcgcagaaaaaaaggatctc
aagaagatcctttgatcttttctacggggtctgacgctcagtggaacgaaaactcacgttaagggatt
ttggtcatgagattatcaaaaaggatcttcacctagatccttttaaattaaaaatgaagttttaaatc
aatctaaagtatatatgagtaaacttggtctgacagttaccaatgcttaatcagtgaggcacctatct
cagcgatctgtctatttcgttcatccatagttgcctgactccccgtcgtgtagataactacgatacgg
gagggcttaccatctggccccagtgctgcaatgataccgcgagacccacgctcaccggctccagattt
atcagcaataaaccagccagccggaagggccgagcgcagaagtggtcctgcaactttatccgcctcca
tccagtctattaattgttgccgggaagctagagtaagtagttcgccagttaatagtttgcgcaacgtt
gttgccattgctacaggcatcgtggtgtcacgctcgtcgtttggtatggcttcattcagctccggttc
ccaacgatcaaggcgagttacatgatcccccatgttgtgcaaaaaagcggttagctccttcggtcctc
cgatcgttgtcagaagtaagttggccgcagtgttatcactcatggttatggcagcactgcataattct
cttactgtcatgccatccgtaagatgcttttctgtgactggtgagtactcaaccaagtcattctgaga
atagtgtatgcggcgaccgagttgctcttgcccggcgtcaatacgggataataccgcgccacatagca
gaactttaaaagtgctcatcattggaaaacgttcttcggggcgaaaactctcaaggatcttaccgctg
ttgagatccagttcgatgtaacccactcgtgcacccaactgatcttcagcatcttttactttcaccag
cgtttctgggtgagcaaaaacaggaaggcaaaatgccgcaaaaaagggaataagggcgacacggaaat
gttgaatactcatactcttcctttttcaatattattgaagcatttatcagggttattgtctcatgagc
ggatacatatttgaatgtatttagaaaaataaacaaataggggttccgcgcacatttccccgaaaagt
gccac
SEQ ID NO: 38
Fwd primer
5′-aatgatacggcgaccaccgagatctacacaatttcttgggtagtttgcagtt
SEQ ID NO: 39
Reverse primer
5′-caagcagaagacggcatacgagat-(6-bp index sequence)-
actcggtgccactttttcaa
SEQ ID NO: 40
Read1
5′-gatttcttggctttatatatcttgtggaaaggacgaaacaccg
SEQ ID NO: 41
Index
5′-gctagtccgttatcaacttgaaaaagtggcaccgagtc
SEQ ID NO: 42
Read2
5′-gttgataacggactagccttattttaacttgctatttctagctctaaaac
SEQ ID NO: 43
VP64-dCas9-VP64 protein
RADALDDFDLDMLGSDALDDEDLDMLGSDALDDEDLDMLGSDALDDEDLDMVNPKKKRKVGRGMDKKY
SIGLAIGTNSVGWAVITDEYKVPSKKFKVLGNTDRHSIKKNLIGALLFDSGETAEATRLKRTARRRYT
RRKNRICYLQEIFSNEMAKVDDSFFHRLEESFLVEEDKKHERHPIFGNIVDEVAYHEKYPTIYHLRKK
LVDSTDKADLRLIYLALAHMIKERGHFLIEGDLNPDNSDVDKLFIQLVQTYNQLFEENPINASGVDAK
AILSARLSKSRRLENLIAQLPGEKKNGLEGNLIALSLGLTPNEKSNFDLAEDAKLQLSKDTYDDDLDN
LLAQIGDQYADLFLAAKNLSDAILLSDILRVNTEITKAPLSASMIKRYDEHHQDITLLKALVRQQLPE
KYKEIFFDQSKNGYAGYIDGGASQEEFYKFIKPILEKMDGTEELLVKLNREDLLRKQRTEDNGSIPHQ
IHLGELHAILRRQEDFYPFLKDNREKIEKILTFRIPYYVGPLARGNSRFAWMTRKSEETITPWNFEEV
VDKGASAQSFIERMTNFDKNLPNEKVLPKHSLLYEYFTVYNELTKVKYVTEGMRKPAFLSGEQKKAIV
DLLFKTNRKVTVKQLKEDYFKKIECFDSVEISGVEDRENASLGTYHDLLKIIKDKDFLDNEENEDILE
DIVLTLTLFEDREMIEERLKTYAHLEDDKVMKQLKRRRYTGWGRLSRKLINGIRDKQSGKTILDFLKS
DGFANRNFMQLIHDDSLTFKEDIQKAQVSGQGDSLHEHIANLAGSPAIKKGILQTVKVVDELVKVMGR
HKPENIVIEMARENQTTQKGQKNSRERMKRIEEGIKELGSQILKEHPVENTQLQNEKLYLYYLQNGRD
MYVDQELDINRLSDYDVDAIVPQSFLKDDSIDNKVLTRSDKNRGKSDNVPSEEVVKKMKNYWRQLLNA
KLITQRKEDNITKAERGGLSELDKAGFIKRQLVETRQITKHVAQILDSRMNTKYDENDKLIREVKVIT
LKSKLVSDFRKDFQFYKVREINNYHHAHDAYLNAVVGTALIKKYPKLESEFVYGDYKVYDVRKMIAKS
EQEIGKATAKYFFYSNIMNFFKTEITLANGEIRKRPLIETNGETGEIVWDKGRDFATVRKVLSMPQVN
IVKKTEVQTGGFSKESILPKRNSDKLIARKKDWDPKKYGGFDSPTVAYSVLVVAKVEKGKSKKLKSVK
ELLGITIMERSSFEKNPIDFLEAKGYKEVKKDLIIKLPKYSLFELENGRKRMLASAGELQKGNELALP
SKYVNFLYLASHYEKLKGSPEDNEQKQLFVEQHKHYLDEIIEQISEFSKRVILADANLDKVLSAYNKH
RDKPIREQAENIIHLFTLINLGAPAAFKYFDTTIDRKRYTSTKEVLDATLIHQSITGLYETRIDLSQL
GGDSRADPKKKRKVASRADALDDEDLDMLGSDALDDEDLDMLGSDALDDEDLDMLGSDALDDEDLDML
I
SEQ ID NO: 44
VP64-dCas9-VP64 DNA
cgggctgacgcattggacgattttgatctggatatgctgggaagtgacgccctcgatgattttgacct
tgacatgcttggttcggatgcccttgatgactttgacctcgacatgctcggcagtgacgcccttgatg
atttcgacctggacatggttaaccccaagaagaagaggaaggtgggccgcggaatggacaagaagtac
tccattgggctcgccatcggcacaaacagcgtcggctgggccgtcattacggacgagtacaaggtgcc
gagcaaaaaattcaaagttctgggcaataccgatcgccacagcataaagaagaacctcattggcgccc
tcctgttcgactccggggaaaccgccgaagccacgcggctcaaaagaacagcacggcgcagatatacc
cgcagaaagaatcggatctgctacctgcaggagatctttagtaatgagatggctaaggtggatgactc
tttcttccataggctggaggagtcctttttggtggaggaggataaaaagcacgagcgccacccaatct
ttggcaatatcgtggacgaggtggcgtaccatgaaaagtacccaaccatatatcatctgaggaagaag
cttgtagacagtactgataaggctgacttgcggttgatctatctcgcgctggcgcatatgatcaaatt
tcggggacacttcctcatcgagggggacctgaacccagacaacagcgatgtcgacaaactctttatcc
aactggttcagacttacaatcagcttttcgaagagaacccgatcaacgcatccggagttgacgccaaa
gcaatcctgagcgctaggctgtccaaatcccggcggctcgaaaacctcatcgcacagctccctgggga
gaagaagaacggcctgtttggtaatcttatcgccctgtcactcgggctgacccccaactttaaatcta
acttcgacctggccgaagatgccaagcttcaactgagcaaagacacctacgatgatgatctcgacaat
ctgctggcccagatcggcgaccagtacgcagacctttttttggcggcaaagaacctgtcagacgccat
tctgctgagtgatattctgcgagtgaacacggagatcaccaaagctccgctgagcgctagtatgatca
agcgctatgatgagcaccaccaagacttgactttgctgaaggcccttgtcagacagcaactgcctgag
aagtacaaggaaattttcttcgatcagtctaaaaatggctacgccggatacattgacggcggagcaag
ccaggaggaattttacaaatttattaagcccatcttggaaaaaatggacggcaccgaggagctgctgg
taaagcttaacagagaagatctgttgcgcaaacagcgcactttcgacaatggaagcatcccccaccag
attcacctgggcgaactgcacgctatcctcaggcggcaagaggatttctacccctttttgaaagataa
cagggaaaagattgagaaaatcctcacatttcggataccctactatgtaggccccctcgcccggggaa
attccagattcgcgtggatgactcgcaaatcagaagagaccatcactccctggaacttcgaggaagtc
gtggataagggggcctctgcccagtccttcatcgaaaggatgactaactttgataaaaatctgcctaa
cgaaaaggtgcttcctaaacactctctgctgtacgagtacttcacagtttataacgagctcaccaagg
tcaaatacgtcacagaagggatgagaaagccagcattcctgtctggagagcagaagaaagctatcgtg
gacctcctcttcaagacgaaccggaaagttaccgtgaaacagctcaaagaagactatttcaaaaagat
tgaatgtttcgactctgttgaaatcagcggagtggaggatcgcttcaacgcatccctgggaacgtatc
acgatctcctgaaaatcattaaagacaaggacttcctggacaatgaggagaacgaggacattcttgag
gacattgtcctcacccttacgttgtttgaagatagggagatgattgaagaacgcttgaaaacttacgc
tcatctcttcgacgacaaagtcatgaaacagctcaagaggcgccgatatacaggatgggggcggctgt
caagaaaactgatcaatgggatccgagacaagcagagtggaaagacaatcctggattttcttaagtcc
gatggatttgccaaccggaacttcatgcagttgatccatgatgactctctcacctttaaggaggacat
ccagaaagcacaagtttctggccagggggacagtcttcacgagcacatcgctaatcttgcaggtagcc
cagctatcaaaaagggaatactgcagaccgttaaggtcgtggatgaactcgtcaaagtaatgggaagg
cataagcccgagaatatcgttatcgagatggcccgagagaaccaaactacccagaagggacagaagaa
cagtagggaaaggatgaagaggattgaagagggtataaaagaactggggtcccaaatccttaaggaac
acccagttgaaaacacccagcttcagaatgagaagctctacctgtactacctgcagaacggcagggac
atgtacgtggatcaggaactggacatcaatcggctctccgactacgacgtggatgccatcgtgcccca
gtcttttctcaaagatgattctattgataataaagtgttgacaagatccgataaaaatagagggaaga
gtgataacgtcccctcagaagaagttgtcaagaaaatgaaaaattattggcggcagctgctgaacgcc
aaactgatcacacaacggaagttcgataatctgactaaggctgaacgaggtggcctgtctgagttgga
taaagccggcttcatcaaaaggcagcttgttgagacacgccagatcaccaagcacgtggcccaaattc
tcgattcacgcatgaacaccaagtacgatgaaaatgacaaactgattcgagaggtgaaagttattact
ctgaagtctaagctggtctcagatttcagaaaggactttcagttttataaggtgagagagatcaacaa
ttaccaccatgcgcatgatgcctacctgaatgcagtggtaggcactgcacttatcaaaaaatatccca
agcttgaatctgaatttgtttacggagactataaagtgtacgatgttaggaaaatgatcgcaaagtct
gagcaggaaataggcaaggccaccgctaagtacttcttttacagcaatattatgaattttttcaagac
cgagattacactggccaatggagagattcggaagcgaccacttatcgaaacaaacggagaaacaggag
aaatcgtgtgggacaagggtagggatttcgcgacagtccggaaggtcctgtccatgccgcaggtgaac
atcgttaaaaagaccgaagtacagaccggaggcttctccaaggaaagtatcctcccgaaaaggaacag
cgacaagctgatcgcacgcaaaaaagattgggaccccaagaaatacggcggattcgattctcctacag
tcgcttacagtgtactggttgtggccaaagtggagaaagggaagtctaaaaaactcaaaagcgtcaag
gaactgctgggcatcacaatcatggagcgatcaagcttcgaaaaaaaccccatcgactttctcgaggc
gaaaggatataaagaggtcaaaaaagacctcatcattaagcttcccaagtactctctctttgagcttg
aaaacggccggaaacgaatgctcgctagtgcgggcgagctgcagaaaggtaacgagctggcactgccc
tctaaatacgttaatttcttgtatctggccagccactatgaaaagctcaaagggtctcccgaagataa
tgagcagaagcagctgttcgtggaacaacacaaacactaccttgatgagatcatcgagcaaataagcg
aattctccaaaagagtgatcctcgccgacgctaacctcgataaggtgctttctgcttacaataagcac
agggataagcccatcagggagcaggcagaaaacattatccacttgtttactctgaccaacttgggcgc
gcctgcagccttcaagtacttcgacaccaccatagacagaaagcggtacacctctacaaaggaggtcc
tggacgccacactgattcatcagtcaattacggggctctatgaaacaagaatcgacctctctcagctc
ggtggagacagcagggctgaccccaagaagaagaggaaggtggctagccgcgccgacgcgctggacga
tttcgatctcgacatgctgggttctgatgccctcgatgactttgacctggatatgttgggaagcgacg
cattggatgactttgatctggacatgctcggctccgatgctctggacgatttcgatctcgatatgtta
atc
SEQ ID NO: 45
Human p300 (with L553M mutation) protein
MAENVVEPGPPSAKRPKLSSPALSASASDGTDFGSLEDLEHDLPDELINSTELGLINGGDINQLQTSL
GMVQDAASKHKQLSELLRSGSSPNLNMGVGGPGQVMASQAQQSSPGLGLINSMVKSPMTQAGLTSPNM
GMGTSGPNQGPTQSTGMMNSPVNQPAMGMNTGMNAGMNPGMLAAGNGQGIMPNQVMNGSIGAGRGRQN
MQYPNPGMGSAGNLLTEPLQQGSPQMGGQTGLRGPQPLKMGMMNNPNPYGSPYTQNPGQQIGASGLGL
QIQTKTVLSNNLSPFAMDKKAVPGGGMPNMGQQPAPQVQQPGLVTPVAQGMGSGAHTADPEKRKLIQQ
QLVLLLHAHKCQRREQANGEVRQCNLPHCRTMKNVLNHMTHCQSGKSCQVAHCASSRQIISHWKNCTR
HDCPVCLPLKNAGDKRNQQPILTGAPVGLGNPSSLGVGQQSAPNLSTVSQIDPSSIERAYAALGLPYQ
VNQMPTQPQVQAKNQQNQQPGQSPQGMRPMSNMSASPMGVNGGVGVQTPSLLSDSMLHSAINSQNPMM
SENASVPSMGPMPTAAQPSTTGIRKQWHEDITQDLRNHLVHKLVQAIFPTPDPAALKDRRMENLVAYA
RKVEGDMYESANNRAEYYHLLAEKIYKIQKELEEKRRTRLQKQNMLPNAAGMVPVSMNPGPNMGQPQP
GMTSNGPLPDPSMIRGSVPNQMMPRITPQSGLNQFGQMSMAQPPIVPRQTPPLQHHGQLAQPGALNPP
MGYGPRMQQPSNQGQFLPQTQFPSQGMNVTNIPLAPSSGQAPVSQAQMSSSSCPVNSPIMPPGSQGSH
IHCPQLPQPALHQNSPSPVPSRTPTPHHTPPSIGAQQPPATTIPAPVPTPPAMPPGPQSQALHPPPRQ
TPTPPTTQLPQQVQPSLPAAPSADQPQQQPRSQQSTAASVPTPTAPLLPPQPATPLSQPAVSIEGQVS
NPPSTSSTEVNSQAIAEKQPSQEVKMEAKMEVDQPEPADTQPEDISESKVEDCKMESTETEERSTELK
TEIKEEEDQPSTSATQSSPAPGQSKKKIFKPEELRQALMPTLEALYRQDPESLPFRQPVDPQLLGIPD
YFDIVKSPMDLSTIKRKLDTGQYQEPWQYVDDIWLMENNAWLYNRKTSRVYKYCSKLSEVFEQEIDPV
MQSLGYCCGRKLEFSPQTLCCYGKQLCTIPRDATYYSYQNRYHFCEKCFNEIQGESVSLGDDPSQPQT
TINKEQFSKRKNDTLDPELFVECTECGRKMHQICVLHHEIIWPAGFVCDGCLKKSARTRKENKESAKR
LPSTRLGTFLENRVNDFLRRQNHPESGEVTVRVVHASDKTVEVKPGMKARFVDSGEMAESFPYRTKAL
FAFEEIDGVDLCFFGMHVQEYGSDCPPPNQRRVYISYLDSVHFFRPKCLRTAVYHEILIGYLEYVKKL
GYTTGHIWACPPSEGDDYIFHCHPPDQKIPKPKRLQEWYKKMLDKAVSERIVHDYKDIFKQATEDRLT
SAKELPYFEGDFWPNVLEESIKELEQEEEERKREENTSNESTDVTKGDSKNAKKKNNKKTSKNKSSLS
RGNKKKPGMPNVSNDLSQKLYATMEKHKEVFFVIRLIAGPAANSLPPIVDPDPLIPCDLMDGRDAFLT
LARDKHLEFSSLRRAQWSTMCMIVELHTQSQDREVYTCNECKHHVETRWHCTVCEDYDLCITCYNTKN
HDHKMEKLGLGLDDESNNQQAAATQSPGDSRRLSIQRCIQSLVHACQCRNANCSLPSCQKMKRVVQHT
KGCKRKINGGCPICKQLIALCCYHAKHCQENKCPVPFCLNIKQKLRQQQLQHRLQQAQMLRRRMASMQ
RTGVVGQQQGLPSPTPATPTTPTGQQPTTPQTPQPTSQPQPTPPNSMPPYLPRTQAAGPVSQGKAAGQ
VTPPTPPQTAQPPLPGPPPAAVEMAMQIQRAAETQRQMAHVQIFQRPIQHQMPPMTPMAPMGMNPPPM
TRGPSGHLEPGMGPTGMQQQPPWSQGGLPQPQQLQSGMPRPAMMSVAQHGQPLNMAPQPGLGQVGISP
LKPGTVSQQALQNLLRTLRSPSSPLQQQQVISILHANPQLLAAFIKQRAAKYANSNPQPIPGQPGMPQ
GQPGLQPPTMPGQQGVHSNPAMQNMNPMQAGVQRAGLPQQQPQQQLQPPMGGMSPQAQQMNMNHNTMP
SQFRDILRRQQMMQQQQQQGAGPGIGPGMANHNQFQQPQGVGYPPQQQQRMQHHMQQMQQGNMGQIGQ
LPQALGAEAGASLQAYQQRLLQQQMGSPVQPNPMSPQQHMLPNQAQSPHLQGQQIPNSLSNQVRSPQP
VPSPRPQSQPPHSSPSPRMQPQPSPHHVSPQTSSPHPGLVAAQANPMEQGHFASPDQNSMLSQLASNP
GMANLHGASATDLGLSTDNSDLNSNLSQSTLDIH
SEQ ID NO: 46
Human p300 Core Effector protein (aa 1048-1664 of SEQ ID NO: 134)
IFKPEELRQALMPTLEALYRQDPESLPFRQPVDPQLLGIPDYFDIVKSPMDLSTIKRKLDTGQYQEPW
QYVDDIWLMFNNAWLYNRKTSRVYKYCSKLSEVFEQEIDPVMQSLGYCCGRKLEFSPQTLCCYGKQLC
TIPRDATYYSYQNRYHFCEKCFNEIQGESVSLGDDPSQPQTTINKEQFSKRKNDTLDPELFVECTECG
RKMHQICVLHHEIIWPAGFVCDGCLKKSARTRKENKFSAKRLPSTRLGTFLENRVNDFLRRQNHPESG
EVTVRVVHASDKTVEVKPGMKARFVDSGEMAESFPYRTKALFAFEEIDGVDLCFFGMHVQEYGSDCPP
PNQRRVYISYLDSVHFFRPKCLRTAVYHEILIGYLEYVKKLGYTTGHIWACPPSEGDDYIFHCHPPDQ
KIPKPKRLQEWYKKMLDKAVSERIVHDYKDIFKCATEDRLTSAKELPYFEGDFWPNVLEESIKELEQE
EEERKREENTSNESTDVTKGDSKNAKKKNNKKTSKNKSSLSRGNKKKPGMPNVSNDLSQKLYATMEKH
KEVFFVIRLIAGPAANSLPPIVDPDPLIPCDLMDGRDAFLTLARDKHLEFSSLRRAQWSTMCMLVELH
TQSQD
SEQ ID NO: 87
Polynucleotide sequence encoding Streptococcus pyogenes dCas9-KRAB
atggactacaaagaccatgacggtgattataaagatcatgacatcgattacaaggatgacga
tgacaagatggcccccaagaagaagaggaaggtgggccgcggaatggacaagaagtactcca
ttgggctcgccatcggcacaaacagcgtcggctgggccgtcattacggacgagtacaaggtg
ccgagcaaaaaattcaaagttctgggcaataccgatcgccacagcataaagaagaacctcat
tggcgccctcctgttcgactccggggaaaccgccgaagccacgcggctcaaaagaacagcac
ggcgcagatatacccgcagaaagaatcggatctgctacctgcaggagatctttagtaatgag
atggctaaggtggatgactctttcttccataggctggaggagtcctttttggtggaggagga
taaaaagcacgagcgccacccaatctttggcaatatcgtggacgaggtggcgtaccatgaaa
agtacccaaccatatatcatctgaggaagaagcttgtagacagtactgataaggctgacttg
cggttgatctatctcgcgctggcgcatatgatcaaatttcggggacacttcctcatcgaggg
ggacctgaacccagacaacagcgatgtcgacaaactctttatccaactggttcagacttaca
atcagcttttcgaagagaacccgatcaacgcatccggagttgacgccaaagcaatcctgagc
gctaggctgtccaaatcccggcggctcgaaaacctcatcgcacagctccctggggagaagaa
gaacggcctgtttggtaatcttatcgccctgtcactcgggctgacccccaactttaaatcta
acttcgacctggccgaagatgccaagcttcaactgagcaaagacacctacgatgatgatctc
gacaatctgctggcccagatcggcgaccagtacgcagacctttttttggcggcaaagaacct
gtcagacgccattctgctgagtgatattctgcgagtgaacacggagatcaccaaagctccgc
tgagcgctagtatgatcaagcgctatgatgagcaccaccaagacttgactttgctgaaggcc
cttgtcagacagcaactgcctgagaagtacaaggaaattttcttcgatcagtctaaaaatgg
ctacgccggatacattgacggcggagcaagccaggaggaattttacaaatttattaagccca
tcttggaaaaaatggacggcaccgaggagctgctggtaaagcttaacagagaagatctgttg
cgcaaacagcgcactttcgacaatggaagcatcccccaccagattcacctgggcgaactgca
cgctatcctcaggcggcaagaggatttctacccctttttgaaagataacagggaaaagattg
agaaaatcctcacatttcggataccctactatgtaggccccctcgcccggggaaattccaga
ttcgcgtggatgactcgcaaatcagaagagaccatcactccctggaacttcgaggaagtcgt
ggataagggggcctctgcccagtccttcatcgaaaggatgactaactttgataaaaatctgc
ctaacgaaaaggtgcttcctaaacactctctgctgtacgagtacttcacagtttataacgag
ctcaccaaggtcaaatacgtcacagaagggatgagaaagccagcattcctgtctggagagca
gaagaaagctatcgtggacctcctcttcaagacgaaccggaaagttaccgtgaaacagctca
aagaagactatttcaaaaagattgaatgtttcgactctgttgaaatcagcggagtggaggat
cgcttcaacgcatccctgggaacgtatcacgatctcctgaaaatcattaaagacaaggactt
cctggacaatgaggagaacgaggacattcttgaggacattgtcctcacccttacgttgtttg
aagatagggagatgattgaagaacgcttgaaaacttacgctcatctcttcgacgacaaagtc
atgaaacagctcaagaggcgccgatatacaggatgggggcggctgtcaagaaaactgatcaa
tgggatccgagacaagcagagtggaaagacaatcctggattttcttaagtccgatggatttg
ccaaccggaacttcatgcagttgatccatgatgactctctcacctttaaggaggacatccag
aaagcacaagtttctggccagggggacagtcttcacgagcacatcgctaatcttgcaggtag
cccagctatcaaaaagggaatactgcagaccgttaaggtcgtggatgaactcgtcaaagtaa
tgggaaggcataagcccgagaatatcgttatcgagatggcccgagagaaccaaactacccag
aagggacagaagaacagtagggaaaggatgaagaggattgaagagggtataaaagaactggg
gtcccaaatccttaaggaacacccagttgaaaacacccagcttcagaatgagaagctctacc
tgtactacctgcagaacggcagggacatgtacgtggatcaggaactggacatcaatcggctc
tccgactacgacgtggatgccatcgtgccccagtcttttctcaaagatgattctattgataa
taaagtgttgacaagatccgataaaaatagagggaagagtgataacgtcccctcagaagaag
ttgtcaagaaaatgaaaaattattggcggcagctgctgaacgccaaactgatcacacaacgg
aagttcgataatctgactaaggctgaacgaggtggcctgtctgagttggataaagccggctt
catcaaaaggcagcttgttgagacacgccagatcaccaagcacgtggcccaaattctcgatt
cacgcatgaacaccaagtacgatgaaaatgacaaactgattcgagaggtgaaagttattact
ctgaagtctaagctggtctcagatttcagaaaggactttcagttttataaggtgagagagat
caacaattaccaccatgcgcatgatgcctacctgaatgcagtggtaggcactgcacttatca
aaaaatatcccaagcttgaatctgaatttgtttacggagactataaagtgtacgatgttagg
aaaatgatcgcaaagtctgagcaggaaataggcaaggccaccgctaagtacttcttttacag
caatattatgaattttttcaagaccgagattacactggccaatggagagattcggaagcgac
cacttatcgaaacaaacggagaaacaggagaaatcgtgtgggacaagggtagggatttcgcg
acagtccggaaggtcctgtccatgccgcaggtgaacatcgttaaaaagaccgaagtacagac
cggaggcttctccaaggaaagtatcctcccgaaaaggaacagcgacaagctgatcgcacgca
aaaaagattgggaccccaagaaatacggcggattcgattctcctacagtcgcttacagtgta
ctggttgtggccaaagtggagaaagggaagtctaaaaaactcaaaagcgtcaaggaactgct
gggcatcacaatcatggagcgatcaagcttcgaaaaaaaccccatcgactttctcgaggcga
aaggatataaagaggtcaaaaaagacctcatcattaagcttcccaagtactctctctttgag
cttgaaaacggccggaaacgaatgctcgctagtgcgggcgagctgcagaaaggtaacgagct
ggcactgccctctaaatacgttaatttcttgtatctggccagccactatgaaaagctcaaag
ggtctcccgaagataatgagcagaagcagctgttcgtggaacaacacaaacactaccttgat
gagatcatcgagcaaataagcgaattctccaaaagagtgatcctcgccgacgctaacctcga
taaggtgctttctgcttacaataagcacagggataagcccatcagggagcaggcagaaaaca
ttatccacttgtttactctgaccaacttgggcgcgcctgcagccttcaagtacttcgacacc
accatagacagaaagcggtacacctctacaaaggaggtcctggacgccacactgattcatca
gtcaattacggggctctatgaaacaagaatcgacctctctcagctcggtggagacagcaggg
ctgaccccaagaagaagaggaaggtggctagcgatgctaagtcactgactgcctggtcccgg
acactggtgaccttcaaggatgtgtttgtggacttcaccagggaggagtggaagctgctgga
cactgctcagcagatcctgtacagaaatgtgatgctggagaactataagaacctggtttcct
tgggttatcagcttactaagccagatgtgatcctccggttggagaagggagaagagccctgg
ctggtggagagagaaattcaccaagagacccatcctgattcagagactgcatttgaaatcaa
atcatcagttccgaaaaagaaacgcaaagtttga
SEQ ID NO: 88
Polypeptide sequence of Streptococcus pyogenes dCas9-KRAB protein
MDYKDHDGDYKDHDIDYKDDDDKMAPKKKRKVGRGMDKKYSIGLAIGTNSVGWAVITDEYKV
PSKKFKVLGNTDRHSIKKNLIGALLEDSGETAEATRLKRTARRRYTRRKNRICYLQEIESNE
MAKVDDSFFHRLEESFLVEEDKKHERHPIFGNIVDEVAYHEKYPTIYHLRKKLVDSTDKADL
RLIYLALAHMIKFRGHFLIEGDLNPDNSDVDKLFIQLVQTYNQLFEENPINASGVDAKAILS
ARLSKSRRLENLIAQLPGEKKNGLFGNLIALSLGLTPNEKSNFDLAEDAKLQLSKDTYDDDL
DNLLAQIGDQYADLFLAAKNLSDAILLSDILRVNTEITKAPLSASMIKRYDEHHQDLTLLKA
LVRQQLPEKYKEIFFDQSKNGYAGYIDGGASQEEFYKFIKPILEKMDGTEELLVKLNREDLL
RKQRTFDNGSIPHQIHLGELHAILRRQEDFYPFLKDNREKIEKILTFRIPYYVGPLARGNSR
FAWMIRKSEETITPWNFEEVVDKGASAQSFIERMTNEDKNIPNEKVLPKHSLLYEYETVYNE
LTKVKYVTEGMRKPAFLSGEQKKAIVDLLFKTNRKVTVKQLKEDYFKKIECFDSVEISGVED
RENASLGTYHDLLKIIKDKDELDNEENEDILEDIVLILTLFEDREMIEERLKTYAHLEDDKV
MKQLKRRRYTGWGRLSRKLINGIRDKQSGKTILDFLKSDGFANRNEMQLIHDDSLTFKEDIQ
KAQVSGQGDSLHEHIANLAGSPAIKKGILQTVKVVDELVKVMGRHKPENIVIEMARENQTTQ
KGQKNSRERMKRIEEGIKELGSQILKEHPVENTQLQNEKLYLYYLQNGRDMYVDQELDINRL
SDYDVDAIVPQSFLKDDSIDNKVLTRSDKNRGKSDNVPSEEVVKKMKNYWRQLLNAKLITQR
KEDNLTKAERGGLSELDKAGFIKRQLVETRQITKHVAQILDSRMNTKYDENDKLIREVKVIT
LKSKLVSDFRKDFQFYKVREINNYHHAHDAYLNAVVGTALIKKYPKLESEFVYGDYKVYDVR
KMIAKSEQEIGKATAKYFFYSNIMNFFKTEITLANGEIRKRPLIEINGETGEIVWDKGRDFA
TVRKVLSMPQVNIVKKTEVQTGGESKESILPKRNSDKLIARKKDWDPKKYGGFDSPTVAYSV
LVVAKVEKGKSKKLKSVKELLGITIMERSSFEKNPIDFLEAKGYKEVKKDLIIKLPKYSLFE
LENGRKRMLASAGELQKGNELALPSKYVNFLYLASHYEKLKGSPEDNEQKQLFVEQHKHYLD
EIIEQISEFSKRVILADANLDKVLSAYNKHRDKPIREQAENIIHLETLTNLGAPAAFKYEDT
TIDRKRYTSTKEVLDATLIHQSITGLYETRIDLSQLGGDSRADPKKKRKVASDAKSLTAWSR
TLVTFKDVFVDFTREEWKLLDTAQQILYRNVMLENYKNLVSLGYQLTKPDVILRLEKGEEPW
LVEREIHQETHPDSETAFEIKSSVPKKKRKV
SEQ ID NO: 1138
Polynucleotide sequence of Tet1CD (also referred to as Tet1c)
CTGCCCACCTGCAGCTGTCTTGATCGAGTTATACAAAAAGACAAAGGCCCATATTATACACA
CCTTGGGGCAGGACCAAGTGTTGCTGCTGTCAGGGAAATCATGGAGAATAGGTATGGTCAAA
AAGGAAACGCAATAAGGATAGAAATAGTAGTGTACACCGGTAAAGAAGGGAAAAGCTCTCAT
GGGTGTCCAATTGCTAAGTGGGTTTTAAGAAGAAGCAGTGATGAAGAAAAAGTTCTTTGTTT
GGTCCGGCAGCGTACAGGCCACCACTGTCCAACTGCTGTGATGGTGGTGCTCATCATGGTGT
GGGATGGCATCCCTCTTCCAATGGCCGACCGGCTATACACAGAGCTCACAGAGAATCTAAAG
TCATACAATGGGCACCCTACCGACAGAAGATGCACCCTCAATGAAAATCGTACCTGTACATG
TCAAGGAATTGATCCAGAGACTTGTGGAGCTTCATTCTCTTTTGGCTGTTCATGGAGTATGT
ACTTTAATGGCTGTAAGTTTGGTAGAAGCCCAAGCCCCAGAAGATTTAGAATTGATCCAAGC
TCTCCCTTACATGAAAAAAACCTTGAAGATAACTTACAGAGTTTGGCTACACGATTAGCTCC
AATTTATAAGCAGTATGCTCCAGTAGCTTACCAAAATCAGGTGGAATATGAAAATGTTGCCC
GAGAATGTCGGCTTGGCAGCAAGGAAGGTCGACCCTTCTCTGGGGTCACTGCTTGCCTGGAC
TTCTGTGCTCATCCCCACAGGGACATTCACAACATGAATAATGGAAGCACTGTGGTTTGTAC
CTTAACTCGAGAAGATAACCGCTCTTTGGGTGTTATTCCTCAAGATGAGCAGCTCCATGTGC
TACCTCTTTATAAGCTTTCAGACACAGATGAGTTTGGCTCCAAGGAAGGAATGGAAGCCAAG
ATCAAATCTGGGGCCATCGAGGTCCTGGCACCCCGCCGCAAAAAAAGAACGTGTTTCACTCA
GCCTGTTCCCCGTTCTGGAAAGAAGAGGGCTGCGATGATGACAGAGGTTCTTGCACATAAGA
TAAGGGCAGTGGAAAAGAAACCTATTCCCCGAATCAAGCGGAAGAATAACTCAACAACAACA
AACAACAGTAAGCCTTCGTCACTGCCAACCTTAGGGAGTAACACTGAGACCGTGCAACCTGA
AGTAAAAAGTGAAACCGAACCCCATTTTATCTTAAAAAGTTCAGACAACACTAAAACTTATT
CGCTGATGCCATCCGCTCCTCACCCAGTGAAAGAGGCATCTCCAGGCTTCTCCTGGTCCCCG
AAGACTGCTTCAGCCACACCAGCTCCACTGAAGAATGACGCAACAGCCTCATGCGGGTTTTC
AGAAAGAAGCAGCACTCCCCACTGTACGATGCCTTCGGGAAGACTCAGTGGTGCCAATGCTG
CAGCTGCTGATGGCCCTGGCATTTCACAGCTTGGCGAAGTGGCTCCTCTCCCCACCCTGTCT
GCTCCTGTGATGGAGCCCCTCATTAATTCTGAGCCTTCCACTGGTGTGACTGAGCCGCTAAC
GCCTCATCAGCCAAACCACCAGCCCTCCTTCCTCACCTCTCCTCAAGACCTTGCCTCTTCTC
CAATGGAAGAAGATGAGCAGCATTCTGAAGCAGATGAGCCTCCATCAGACGAACCCCTATCT
GATGACCCCCTGTCACCTGCTGAGGAGAAATTGCCCCACATTGATGAGTATTGGTCAGACAG
TGAGCACATCTTTTTGGATGCAAATATTGGTGGGGTGGCCATCGCACCTGCTCACGGCTCGG
TTTTGATTGAGTGTGCCCGGCGAGAGCTGCACGCTACCACTCCTGTTGAGCACCCCAACCGT
AATCATCCAACCCGCCTCTCCCTTGTCTTTTACCAGCACAAAAACCTAAATAAGCCCCAACA
TGGTTTTGAACTAAACAAGATTAAGTTTGAGGCTAAAGAAGCTAAGAATAAGAAAATGAAGG
CCTCAGAGCAAAAAGACCAGGCAGCTAATGAAGGTCCAGAACAGTCCTCTGAAGTAAATGAA
TTGAACCAAATTCCTTCTCATAAAGCATTAACATTAACCCATGACAATGTTGTCACCGTGTC
CCCTTATGCTCTCACACACGTTGCGGGGCCCTATAACCATTGGGTC
SEQ ID NO: 1139
Polypeptide sequence of Tet1CD (also referred to as Tet1c)
LPTCSCLDRVIQKDKGPYYTHLGAGPSVAAVREIMENRYGQKGNAIRIEIVVYTGKEGKSSH
GCPIAKWVLRRSSDEEKVLCLVRQRTGHHCPTAVMVVLIMVWDGIPLPMADRLYTELTENLK
SYNGHPTDRRCTINENRTCTCQGIDPETCGASFSFGCSWSMYENGCKFGRSPSPRRFRIDPS
SPLHEKNLEDNIQSLATRLAPIYKQYAPVAYQNQVEYENVARECRLGSKEGRPESGVTACLD
FCAHPHRDIHNMNNGSTVVCTLTREDNRSLGVIPQDEQLHVLPLYKLSDTDEFGSKEGMEAK
IKSGAIEVLAPRRKKRTCFTQPVPRSGKKRAAMMTEVLAHKIRAVEKKPIPRIKRKNNSTTT
NNSKPSSLPTLGSNTETVQPEVKSETEPHFILKSSDNTKTYSLMPSAPHPVKEASPGFSWSP
KTASATPAPLKNDATASCGFSERSSTPHCTMPSGRLSGANAAAADGPGISQLGEVAPLPTLS
APVMEPLINSEPSTGVTEPLTPHQPNHQPSFLTSPQDLASSPMEEDEQHSEADEPPSDEPLS
DDPLSPAEEKLPHIDEYWSDSEHIFLDANIGGVAIAPAHGSVLIECARRELHATTPVEHPNR
NHPTRLSLVFYQHKNLNKPQHGFELNKIKFEAKEAKNKKMKASEQKDQAANEGPEQSSEVNE
LNQIPSHKALTLTHDNVVTVSPYALTHVAGPYNHWV
SEQ ID NO: 1140
DNA sequence of the gRNA constant region
gtttaagagctatgctggaaacagcatagcaagtttaaataaggctagtccgttatcaactt
gaaaaagtggcaccgagtcggtgc
SEQ ID NO: 1141
RNA sequence of the gRNA constant region
guuuaagagcuaugcuggaaacagcauagcaaguuuaaauaaggcuaguccguuaucaacuu
gaaaaaguggcaccgagucggugc
SEQ ID NO: 1142
RNA sequence of the full gRNA, including SEQ ID NO: 588 (underlined)
Ggaaccagucagaacaggugguuuaagagcuaugcuggaaacagcauagcaaguuuaaauaa
ggcuaguccguuaucaacuugaaaaaguggcaccgagucggugc
SEQ ID NO: 1143
Forward primer
5′-AATGATACGGCGACCACCGAGATCTACACAATTTCTTGGGTAGTTTGCAGTT
SEQ ID NO: 1144
Reverse primer
5′-CAAGCAGAAGACGGCATACGAGAT-(NNNNNN)-GACTCGGTGCCACTTTTTCAA
SEQ ID NO: 1145
Read1
5′-GATTTCTTGGCTTTATATATCTTGTGGAAAGGACGAAACACCG
SEQ ID NO: 1146
Index
5′-GCTAGTCCGTTATCAACTTGAAAAAGTGGCACCGAGTC
SEQ ID NO: 1147
Read2
5′-
GTTGATAACGGACTAGCCTTATTTAAACTTGCTATGCTGTTTCCAGCATAGCTOTTAAAC
SEQ ID NOS: 1148-1165
See TABLE 5.
SEQ ID NO: 1166
Tet1v4 polypetide sequence
LPTCSCLDRVIQKDKGPYYTHLGAGPSVAAVREIMENRYGQKGNAIRIEIVVYTGKEGKSSH
GCPIAKWVLRRSSDEEKVLCLVRQRTGHHCPTAVMVVLIMVWDGIPLPMADRLYTELTENLK
SYNGHPTDRRCTINENRTCTCQGIDPETCGASESFGCSWSMYFNGCKEGRSPSPRRFRIDPS
SPLHEKNLEDNLQSLATRLAPIYKQYAPVAYQNQVEYENVARECRLGSKEGRPFSGVTACLD
FCAHPHRDIHNMNNGSTVVCTLTREDNRSLGVIPQDEQLHVLPLYKLSDTDEFGSKEGMEAK
IKSGAIEVLAPRRKKRTCFTQPVPRSGKKRAAMMTEVLAHKIRAVEKKPIPRIKRKNNSTTT
NNSKPSSLPTLGSNTETVQPEVKSETEPHFILKSSDNTKTYSLMPSAPHPVKEASPGESWSP
KTASATPAPLKNDATASCGFSERSSTPHCTMPSGRLSGANAAAADGPGISQLGEVAPLPTLS
APVMEPLINSEPSTGVTEPLTPHQPNHQPSELTSPQDLASSPMEEDEQHSEADEPPSDEPLS
DDPLSPAEEKLPHIDEYWSDSEHIFLDANIGGVAIAPAHGSVLIECARRELHATTPVEHPNR
NHPTRLSLVFYQHKNLNKPQHGFELNKIKFEAKEAKNKKMKASEQKDQAANEGPEQSSEVNE
LNQIPSHKALTLTHDNVVTVSPYALTHVAGPYNHWV
SEQ ID NO: 1167
Tet1v4 DNA sequence
ctgcccacctgcagctgtcttgatcgagttatacaaaaagacaaaggcccatattatacaca
ccttggggcaggaccaagtgttgctgctgtcagggaaatcatggagaataggtatggtcaaa
aaggaaacgcaataaggatagaaatagtagtgtacaccggtaaagaagggaaaagctctcat
gggtgtccaattgctaagtgggttttaagaagaagcagtgatgaagaaaaagttctttgttt
ggtccggcagcgtacaggccaccactgtccaactgctgtgatggtggtgctcatcatggtgt
gggatggcatccctcttccaatggccgaccggctatacacagagctcacagagaatctaaag
tcatacaatgggcaccctaccgacagaagatgcaccctcaatgaaaatcgtacctgtacatg
tcaaggaattgatccagagacttgtggagcttcattctcttttggctgttcatggagtatgt
actttaatggctgtaagtttggtagaagcccaagccccagaagatttagaattgatccaagc
tctcccttacatgaaaaaaaccttgaagataacttacagagtttggctacacgattagctcc
aatttataagcagtatgctccagtagcttaccaaaatcaggtggaatatgaaaatgttgccc
gagaatgtcggcttggcagcaaggaaggtcgacccttctctggggtcactgcttgcctggac
ttctgtgctcatccccacagggacattcacaacatgaataatggaagcactgtggtttgtac
cttaactcgagaagataaccgctctttgggtgttattcctcaagatgagcagctccatgtgc
tacctctttataagctttcagacacagatgagtttggctccaaggaaggaatggaagccaag
atcaaatctggggccatcgaggtcctggcaccccgccgcaaaaaaagaacgtgtttcactca
gcctgttccccgttctggaaagaagagggctgcgatgatgacagaggttcttgcacataaga
taagggcagtggaaaagaaacctattccccgaatcaagcggaagaataactcaacaacaaca
aacaacagtaagccttcgtcactgccaaccttagggagtaacactgagaccgtgcaacctga
agtaaaaagtgaaaccgaaccccattttatcttaaaaagttcagacaacactaaaacttatt
cgctgatgccatccgctcctcacccagtgaaagaggcatctccaggcttctcctggtccccg
aagactgcttcagccacaccagctccactgaagaatgacgcaacagcctcatgcgggttttc
agaaagaagcagcactccccactgtacgatgccttcgggaagactcagtggtgccaatgctg
cagctgctgatggccctggcatttcacagcttggcgaagtggctcctctccccaccctgtct
gctcctgtgatggagcccctcattaattctgagccttccactggtgtgactgagccgctaac
gcctcatcagccaaaccaccagccctccttcctcacctctcctcaagaccttgcctcttctc
caatggaagaagatgagcagcattctgaagcagatgagcctccatcagacgaacccctatct
gatgaccccctgtcacctgctgaggagaaattgccccacattgatgagtattggtcagacag
tgagcacatctttttggatgcaaatattggtggggtggccatcgcacctgctcacggctcgg
ttttgattgagtgtgcccggcgagagctgcacgctaccactcctgttgagcaccccaaccgt
aatcatccaacccgcctctcccttgtcttttaccagcacaaaaacctaaataagccccaaca
tggttttgaactaaacaagattaagtttgaggctaaagaagctaagaataagaaaatgaagg
cctcagagcaaaaagaccaggcagctaatgaaggtccagaacagtcctctgaagtaaatgaa
ttgaaccaaattccttctcataaagcattaacattaacccatgacaatgttgtcaccgtgtc
cccttatgctctcacacacgttgcggggccctataaccattgggtc
SEQ ID NO: 1168
Tet1c-dCas9 polypeptide sequence (with two NLS sequences; Tet1c in bold; dCas9 in
italics)
MVPKKKRKVGGGGSGSLPTCSCLDRVIQKDKGPYYTHLGAGPSVAAVREIMENRYGQKGNAI
RIEIVVYTGKEGKSSHGCPIAKWVLRRSSDEEKVLCLVRQRTGHHCPTAVMVVLIMVWDGIP
LPMADRLYTELTENLKSYNGHPTDRRCTLNENRTCTCQGIDPETCGASFSFGCSWSMYENGC
KFGRSPSPRRFRIDPSSPLHEKNLEDNLQSLATRLAPIYKQYAPVAYQNQVEYENVARECRL
GSKEGRPFSGVTACLDFCAHPERDIHNMNNGSTVVCTLTREDNRSLGVIPQDEQLHVLPLYK
LSDTDEFGSKEGMEAKIKSGAIEVLAPRRKKRTCFTQPVPRSGKKRAAMMTEVLAHKIRAVE
KKPIPRIKRKNNSTTTNNSKPSSLPTLGSNTETVQPEVKSETEPHFILKSSDNTKTYSLMPS
APHPVKEASPGFSWSPKTASATPAPLKNDATASCGFSERSSTPHCTMPSGRLSGANAAAADG
PGISQLGEVAPLPTLSAPVMEPLINSEPSTGVTEPLTPHQPNHQPSFLTSPQDLASSPMEED
EQHSEADEPPSDEPLSDDPLSPAEEKLPHIDEYWSDSEHIFLDANIGGVAIAPAHGSVLIEC
ARRELHATTPVEHPNRNHPTRLSLVFYQHKNLNKPQHGFELNKIKFEAKEAKNKKMKASEQK
DQAANEGPEQSSEVNELNQIPSHKALTLTHDNVVTVSPYALTHVAGPYNHWVGRPFGGGGSM
DYKDHDGDYKDHDIDYKDDDDKMAPKKKRKVGIHGVPAADKKYSIGLAIGINSVGWAVITDE
YKVPSKKFKVLGNTDRHSIKKNLIGALLFDSGETAEATRLKRTARRRYTRRKNRICYLQEIF
SNEMAKVDDSFFHRLEESFLVEEDKKHERHPIFGNIVDEVAYHEKYPTIYHLRKKLVDSTDK
ADERLIYLALAHMIKERGHFLIEGDLNPDNSDVDKLFIQLVQTYNQLFEENPINASGVDAKA
ILSARLSKSRRLENLIAQLPGEKKNGLFGNLIALSLGLTPNFKSNEDLAEDAKLQLSKDTYD
DDLDNLLAQIGDQYADLFLAAKNLSDAILLSDILRVNTEITKAPLSASMIKRYDEHHQDLTD
LKALVRQQLPEKYKEIFFDQSKNGYAGYIDGGASQEEFYKFIKPILEKMDGTEELLVKLNRE
DLLRKQRTEDNGSIPHQIHLGELHAILRRQEDFYPFLKDNREKIEKILTFRIPYYVGPLARG
NSRFAWMTRKSEETITPWNFEEVVDKGASAQSFIERMINEDKNLPNEKVLPKHSLLYEYETV
YNELTKVKYVTEGMRKPAFLSGEQKKAIVDLLEKTNRKVTVKQLKEDYFKKIECFDSVEISG
VEDRFNASLGTYHDLLKIIKDKDELDNEENEDILEDIVLTLILFEDREMIEERLKTYAHLED
DKVMKQLKRRRYTGWGRLSRKLINGIRDKQSGKTILDFLKSDGFANRNEMQLIHDDSLTEKE
DIQKAQVSGQGDSLHEHIANLAGSPAIKKGILQTVKVVDELVKVMGRHKPENIVIEMARENQ
TTQKGQKNSRERMKRIEEGIKELGSQILKEHPVENTQLQNEKLYLYYLQNGRDMYVDQELDI
NRLSDYDVDAIVPQSELKDDSIDNKVLTRSDKNRGKSDNVPSEEVVKKMKNYWRQLLNAKLI
TQRKFDNLTKAERGGLSELDKAGFIKRQLVETRQITKHVAQILDSRMNTKYDENDKLIREVK
VITLKSKLVSDERKDFQFYKVREINNYHHAHDAYLNAVVGTALIKKYPKLESEFVYGDYKVY
DVRKMIAKSEQEIGKATAKYFFYSNIMNFFKTEITLANGEIRKRPLIEINGETGEIVWDKGR
DEATVRKVLSMPQVNIVKKTEVQTGGFSKESILPKRNSDKLIARKKDWDPKKYGGFDSPTVA
YSVLVVAKVEKGKSKKLKSVKELLGITIMERSSFEKNPIDFLEAKGYKEVKKDLIIKLPKYS
LFELENGRKRMLASAGELQKGNELALPSKYVNFLYLASHYEKLKGSPEDNEQKQLFVEQHKH
YIDEIIEQISEFSKRVILADANLDKVLSAYNKHRDKPIREQAENIIHLFTLINLGAPAAFKY
FDTTIDRKRYTSTKEVIDATLIHQSITGLYETRIDLSQLGGDKRPAATKKAGQAKKKKGGDF
GAS
SEQ ID NO: 1169
Tet1c-dCas9 DNA sequence (with two NLS sequences; Tet1c in bold; dCas9 in italics)
atggtgCCAAAAAAGAAGAGAAAGGTAggcggagGCGGGAGCGGATCCCTGCCCACCTGCAG
CTGTCTTGATCGAGTTATACAAAAAGACAAAGGCCCATATTATACACACCTTGGGGCAGGAC
CAAGTGTTGCTGCTGTCAGGGAAATCATGGAGAATAGGTATGGTCAAAAAGGAAACGCAATA
AGGATAGAAATAGTAGTGTACACCGGTAAAGAAGGGAAAAGCTCTCATGGGTGTCCAATTGC
TAAGTGGGTTTTAAGAAGAAGCAGTGATGAAGAAAAAGTTCTTTGTTTGGTCCGGCAGCGTA
CAGGCCACCACTGTCCAACTGCTGTGATGGTGGTGCTCATCATGGTGTGGGATGGCATCCCT
CTTCCAATGGCCGACCGGCTATACACAGAGCTCACAGAGAATCTAAAGTCATACAATGGGCA
CCCTACCGACAGAAGATGCACCCTCAATGAAAATCGTACCTGTACATGTCAAGGAATTGATC
CAGAGACTTGTGGAGCTTCATTCTCTTTTGGCTGTTCATGGAGTATGTACTTTAATGGCTGT
AAGTTTGGTAGAAGCCCAAGCCCCAGAAGATTTAGAATTGATCCAAGCTCTCCCTTACATGA
AAAAAACCTTGAAGATAACTTACAGAGTTTGGCTACACGATTAGCTCCAATTTATAAGCAGT
ATGCTCCAGTAGCTTACCAAAATCAGGTGGAATATGAAAATGTTGCCCGAGAATGTCGGCTT
GGCAGCAAGGAAGGTCGACCCTTCTCTGGGGTCACTGCTTGCCTGGACTTCTGTGCTCATCC
CCACAGGGACATTCACAACATGAATAATGGAAGCACTGTGGTTTGTACCTTAACTCGAGAAG
ATAACCGCTCTTTGGGTGTTATTCCTCAAGATGAGCAGCTCCATGTGCTACCTCTTTATAAG
CTTTCAGACACAGATGAGTTTGGCTCCAAGGAAGGAATGGAAGCCAAGATCAAATCTGGGGC
CATCGAGGTCCTGGCACCCCGCCGCAAAAAAAGAACGTGTTTCACTCAGCCTGTTCCCCGTT
CTGGAAAGAAGAGGGCTGCGATGATGACAGAGGTTCTTGCACATAAGATAAGGGCAGTGGAA
AAGAAACCTATTCCCCGAATCAAGCGGAAGAATAACTCAACAACAACAAACAACAGTAAGCC
TTCGTCACTGCCAACCTTAGGGAGTAACACTGAGACCGTGCAACCTGAAGTAAAAAGTGAAA
CCGAACCCCATTTTATCTTAAAAAGTTCAGACAACACTAAAACTTATTCGCTGATGCCATCC
GCTCCTCACCCAGTGAAAGAGGCATCTCCAGGCTTCTCCTGGTCCCCGAAGACTGCTTCAGC
CACACCAGCTCCACTGAAGAATGACGCAACAGCCTCATGCGGGTTTTCAGAAAGAAGCAGCA
CTCCCCACTGTACGATGCCTTCGGGAAGACTCAGTGGTGCCAATGCTGCAGCTGCTGATGGC
CCTGGCATTTCACAGCTTGGCGAAGTGGCTCCTCTCCCCACCCTGTCTGCTCCTGTGATGGA
GCCCCTCATTAATTCTGAGCCTTCCACTGGTGTGACTGAGCCGCTAACGCCTCATCAGCCAA
ACCACCAGCCCTCCTTCCTCACCTCTCCTCAAGACCTTGCCTCTTCTCCAATGGAAGAAGAT
GAGCAGCATTCTGAAGCAGATGAGCCTCCATCAGACGAACCCCTATCTGATGACCCCCTGTC
ACCTGCTGAGGAGAAATTGCCCCACATTGATGAGTATTGGTCAGACAGTGAGCACATCTTTT
TGGATGCAAATATTGGTGGGGTGGCCATCGCACCTGCTCACGGCTCGGTTTTGATTGAGTGT
GCCCGGCGAGAGCTGCACGCTACCACTCCTGTTGAGCACCCCAACCGTAATCATCCAACCCG
CCTCTCCCTTGTCTTTTACCAGCACAAAAACCTAAATAAGCCCCAACATGGTTTTGAACTAA
ACAAGATTAAGTTTGAGGCTAAAGAAGCTAAGAATAAGAAAATGAAGGCCTCAGAGCAAAAA
GACCAGGCAGCTAATGAAGGTCCAGAACAGTCCTCTGAAGTAAATGAATTGAACCAAATTCC
TTCTCATAAAGCATTAACATTAACCCATGACAATGTTGTCACCGTGTCCCCTTATGCTCTCA
CACACGTTGCGGGGCCCTATAAccattgggtcggccggccattcggtggaggtggctCCATG
GACTATAAGGACCACGACGGAGACTACAAGGATCATGATATTGATTACAAAGACGATGACGA
TAAGATGGCCCCAAAGAAGAAGCGGAAGGTCGGTATCCACGGAGTCCCAGCAGCCGACAAGA
AGTACAGCATCGGCCTGGCCATCGGCACCAACTCTGTGGGCTGGGCCGTGATCACCGACGAG
TACAAGGTGCCCAGCAAGAAATTCAAGGTGCTGGGCAACACCGACCGGCACAGCATCAAGAA
GAACCTGATCGGAGCCCTGCTGTTCGACAGCGGCGAAACAGCCGAGGCCACCCGGCTGAAGA
GAACCGCCAGAAGAAGATACACCAGACGGAAGAACCGGATCTGCTATCTGCAAGAGATCTTC
AGCAACGAGATGGCCAAGGTGGACGACAGCTTCTTCCACAGACTGGAAGAGTCCTTCCTGGT
GGAAGAGGATAAGAAGCACGAGCGGCACCCCATCTTCGGCAACATCGTGGACGAGGTGGCCT
ACCACGAGAAGTACCCCACCATCTACCACCTGAGAAAGAAACTGGTGGACAGCACCGACAAG
GCCGACCTGCGGCTGATCTATCTGGCCCTGGCCCACATGATCAAGTTCCGGGGCCACTTCCT
GATCGAGGGCGACCTGAACCCCGACAACAGCGACGTGGACAAGCTGTTCATCCAGCTGGTGC
AGACCTACAACCAGCTGTTCGAGGAAAACCCCATCAACGCCAGCGGCGTGGACGCCAAGGCC
ATCCTGTCTGCCAGACTGAGCAAGAGCAGACGGCTGGAAAATCTGATCGCCCAGCTGCCCGG
CGAGAAGAAGAATGGCCTGTTCGGAAACCTGATTGCCCTGAGCCTGGGCCTGACCCCCAACT
TCAAGAGCAACTTCGACCTGGCCGAGGATGCCAAACTGCAGCTGAGCAAGGACACCTACGAC
GACGACCTGGACAACCTGCTGGCCCAGATCGGCGACCAGTACGCCGACCTGTTTCTGGCCGC
CAAGAACCTGTCCGACGCCATCCTGCTGAGCGACATCCTGAGAGTGAACACCGAGATCACCA
AGGCCCCCCTGAGCGCCTCTATGATCAAGAGATACGACGAGCACCACCAGGACCTGACCCTG
CTGAAAGCTCTCGTGCGGCAGCAGCTGCCTGAGAAGTACAAAGAGATTTTCTTCGACCAGAG
CAAGAACGGCTACGCCGGCTACATTGACGGCGGAGCCAGCCAGGAAGAGTTCTACAAGTTCA
TCAAGCCCATCCTGGAAAAGATGGACGGCACCGAGGAACTGCTCGTGAAGCTGAACAGAGAG
GACCTGCTGCGGAAGCAGCGGACCTTCGACAACGGCAGCATCCCCCACCAGATCCACCTGGG
AGAGCTGCACGCCATTCTGCGGCGGCAGGAAGATTTTTACCCATTCCTGAAGGACAACCGGG
AAAAGATCGAGAAGATCCTGACCTTCCGCATCCCCTACTACGTGGGCCCTCTGGCCAGGGGA
AACAGCAGATTCGCCTGGATGACCAGAAAGAGCGAGGAAACCATCACCCCCTGGAACTTCGA
GGAAGTGGTGGACAAGGGCGCTTCCGCCCAGAGCTTCATCGAGCGGATGACCAACTTCGATA
AGAACCTGCCCAACGAGAAGGTGCTGCCCAAGCACAGCCTGCTGTACGAGTACTTCACCGTG
TATAACGAGCTGACCAAAGTGAAATACGTGACCGAGGGAATGAGAAAGCCCGCCTTCCTGAG
CGGCGAGCAGAAAAAGGCCATCGTGGACCTGCTGTTCAAGACCAACCGGAAAGTGACCGTGA
AGCAGCTGAAAGAGGACTACTTCAAGAAAATCGAGTGCTTCGACTCCGTGGAAATCTCCGGC
GTGGAAGATCGGTTCAACGCCTCCCTGGGCACATACCACGATCTGCTGAAAATTATCAAGGA
CAAGGACTTCCTGGACAATGAGGAAAACGAGGACATTCTGGAAGATATCGTGCTGACCCTGA
CACTGTTTGAGGACAGAGAGATGATCGAGGAACGGCTGAAAACCTATGCCCACCTGTTCGAC
GACAAAGTGATGAAGCAGCTGAAGCGGCGGAGATACACCGGCTGGGGCAGGCTGAGCCGGAA
GCTGATCAACGGCATCCGGGACAAGCAGTCCGGCAAGACAATCCTGGATTTCCTGAAGTCCG
ACGGCTTCGCCAACAGAAACTTCATGCAGCTGATCCACGACGACAGCCTGACCTTTAAAGAG
GACATCCAGAAAGCCCAGGTGTCCGGCCAGGGCGATAGCCTGCACGAGCACATTGCCAATCT
GGCCGGCAGCCCCGCCATTAAGAAGGGCATCCTGCAGACAGTGAAGGTGGTGGACGAGCTCG
TGAAAGTGATGGGCCGGCACAAGCCCGAGAACATCGTGATCGAAATGGCCAGAGAGAACCAG
ACCACCCAGAAGGGACAGAAGAACAGCCGCGAGAGAATGAAGCGGATCGAAGAGGGCATCAA
AGAGCTGGGCAGCCAGATCCTGAAAGAACACCCCGTGGAAAACACCCAGCTGCAGAACGAGA
AGCTGTACCTGTACTACCTGCAGAATGGGCGGGATATGTACGTGGACCAGGAACTGGACATC
AACCGGCTGTCCGACTACGATGTGGACGCCATCGTGCCTCAGAGCTTTCTGAAGGACGACTC
CATCGACAACAAGGTGCTGACCAGAAGCGACAAGAACCGGGGCAAGAGCGACAACGTGCCCT
CCGAAGAGGTCGTGAAGAAGATGAAGAACTACTGGCGGCAGCTGCTGAACGCCAAGCTGATT
ACCCAGAGAAAGTTCGACAATCTGACCAAGGCCGAGAGAGGCGGCCTGAGCGAACTGGATAA
GGCCGGCTTCATCAAGAGACAGCTGGTGGAAACCCGGCAGATCACAAAGCACGTGGCACAGA
TCCTGGACTCCCGGATGAACACTAAGTACGACGAGAATGACAAGCTGATCCGGGAAGTGAAA
GTGATCACCCTGAAGTCCAAGCTGGTGTCCGATTTCCGGAAGGATTTCCAGTTTTACAAAGT
GCGCGAGATCAACAACTACCACCACGCCCACGACGCCTACCTGAACGCCGTCGTGGGAACCG
CCCTGATCAAAAAGTACCCTAAGCTGGAAAGCGAGTTCGTGTACGGCGACTACAAGGTGTAC
GACGTGCGGAAGATGATCGCCAAGAGCGAGCAGGAAATCGGCAAGGCTACCGCCAAGTACTT
CTTCTACAGCAACATCATGAACTTTTTCAAGACCGAGATTACCCTGGCCAACGGCGAGATCC
GGAAGCGGCCTCTGATCGAGACAAACGGCGAAACCGGGGAGATCGTGTGGGATAAGGGCCGG
GATTTTGCCACCGTGCGGAAAGTGCTGAGCATGCCCCAAGTGAATATCGTGAAAAAGACCGA
GGTGCAGACAGGCGGCTTCAGCAAAGAGTCTATCCTGCCCAAGAGGAACAGCGATAAGCTGA
TCGCCAGAAAGAAGGACTGGGACCCTAAGAAGTACGGCGGCTTCGACAGCCCCACCGTGGCC
TATTCTGTGCTGGTGGTGGCCAAAGTGGAAAAGGGCAAGTCCAAGAAACTGAAGAGTGTGAA
AGAGCTGCTGGGGATCACCATCATGGAAAGAAGCAGCTTCGAGAAGAATCCCATCGACTTTC
TGGAAGCCAAGGGCTACAAAGAAGTGAAAAAGGACCTGATCATCAAGCTGCCTAAGTACTCC
CTGTTCGAGCTGGAAAACGGCCGGAAGAGAATGCTGGCCTCTGCCGGCGAACTGCAGAAGGG
AAACGAACTGGCCCTGCCCTCCAAATATGTGAACTTCCTGTACCTGGCCAGCCACTATGAGA
AGCTGAAGGGCTCCCCCGAGGATAATGAGCAGAAACAGCTGTTTGTGGAACAGCACAAGCAC
TACCTGGACGAGATCATCGAGCAGATCAGCGAGTTCTCCAAGAGAGTGATCCTGGCCGACGC
TAATCTGGACAAAGTGCTGTCCGCCTACAACAAGCACCGGGATAAGCCCATCAGAGAGCAGG
CCGAGAATATCATCCACCTGTTTACCCTGACCAATCTGGGAGCCCCTGCCGCCTTCAAGTAC
TTTGACACCACCATCGACCGGAAGAGGTACACCAGCACCAAAGAGGTGCTGGACGCCACCCT
GATCCACCAGAGCATCACCGGCCTGTACGAGACACGGATCGACCTGTCTCAGCTGGGAGGCG
ACAAAAGGCCGGCGGCCACGAAAAAGGccggacaggccaaaaagaaaaagGGCggagatttc
ggcGctagC
SEQ ID NO: 1170
Tet1v4-dCas9 polypeptide sequence (with three NLS sequences; Tet1v4 in bold; dCas9 in
italics)
MALPTCSCLDRVIQKDKGPYYTHLGAGPSVAAVREIMENRYGQKGNAIRIEIVVYTGKEGKS
SHGCPIAKWVLRRSSDEEKVLCLVRQRTGHHCPTAVMVVLIMVWDGIPLPMADRLYTELTEN
LKSYNGHPTDRRCTLNENRTCTCQGIDPETCGASFSFGCSWSMYENGCKFGRSPSPRRFRID
PSSPLHEKNLEDNLQSLATRLAPIYKQYAPVAYQNQVEYENVARECRLGSKEGRPFSGVTAC
LDFCAHPHRDIHNMNNGSTVVCTLTREDNRSLGVIPQDEQLHVLPLYKLSDTDEFGSKEGME
AKIKSGAIEVLAPRRKKRTCFTQPVPRSGKKRAAMMTEVLAHKIRAVEKKPIPRIKRKNNST
TTNNSKPSSLPTLGSNTETVQPEVKSETEPHFILKSSDNTKTYSLMPSAPHPVKEASPGFSW
SPKTASATPAPLKNDATASCGFSERSSTPHCTMPSGRLSGANAAAADGPGISQLGEVAPLPT
LSAPVMEPLINSEPSTGVTEPLTPHQPNHQPSFLTSPQDLASSPMEEDEQHSEADEPPSDEP
LSDDPLSPAEEKLPHIDEYWSDSEHIFLDANIGGVAIAPAHGSVLIECARRELHATTPVEHP
NRNHPTRLSLVFYQHKNLNKPQHGFELNKIKFEAKEAKNKKMKASEQKDQAANEGPEQSSEV
NELNQIPSHKALTLTHDNVVTVSPYALTHVAGPYNHWVGGPSSGAPPPSGGSPAGSPTSTEE
GTSESATPESGPGTSTEPSEGSAPGSPAGSPTSTEEGTSTEPSEGSAPGTSTEPSEMDKKYS
IGLAIGTNSVGWAVITDEYKVPSKKFKVLGNTDRHSIKKNLIGALLFDSGETAEATRLKRTA
RRRYTRRKNRICYLQEIFSNEMAKVDDSFFHRLEESELVEEDKKHERHPIFGNIVDEVAYHE
KYPTIYHLRKKLVDSTDKADLRLIYLALAHMIKERGHFLIEGDLNPDNSDVDKLFIQLVQTY
NQLFEENPINASGVDAKAILSARLSKSRRLENLIAQLPGEKKNGLEGNLIALSLGLTPNEKS
NEDLAEDAKLQLSKDTYDDDLDNILAQIGDQYADLFLAAKNLSDAILLSDIERVNTEITKAP
LSASMIKRYDEHHQDITLLKALVRQQLPEKYKEIFFDQSKNGYAGYIDGGASQEEFYKFIKP
ILEKMDGTEELLVKINREDLLRKQRTEDNGSIPHQIHLGELHAILRRQEDEYPELKDNREKI
EKILTFRIPYYVGPLARGNSRFAWMTRKSEETITPWNFEEVVDKGASAQSFIERMINEDKNL
PNEKVLPKHSLLYEYFTVYNELTKVKYVTEGMRKPAFLSGEQKKAIVDLLEKTNRKVTVKQL
KEDYFKKIECFDSVEISGVEDRENASLGTYHDLLKIIKDKDFLDNEENEDILEDIVLILTLF
EDREMIEERLKTYAHLEDDKVMKQLKRRRYTGWGRLSRKLINGIRDKQSGKTILDELKSDGF
ANRNEMQLIHDDSLTFKEDIQKAQVSGQGDSLHEHIANLAGSPAIKKGILQTVKVVDELVKV
MGRHKPENIVIEMARENQTTQKGQKNSRERMKRIEEGIKELGSQILKEHPVENTQLQNEKLY
LYYLQNGRDMYVDQELDINRLSDYDVDAIVPQSFLKDDSIDNKVLTRSDKNRGKSDNVPSEE
VVKKMKNYWRQLLNAKLITQRKEDNLTKAERGGLSELDKAGFIKRQLVETRQITKHVAQILD
SRMNTKYDENDKLIREVKVITLKSKLVSDERKDFQFYKVREINNYHHAHDAYLNAVVGTALI
KKYPKLESEFVYGDYKVYDVRKMIAKSEQEIGKATAKYFFYSNIMNFFKTEITLANGEIRKR
PLIETNGETGEIVWDKGRDFATVRKVLSMPQVNIVKKTEVQTGGESKESILPKRNSDKLIAR
KKDWDPKKYGGFDSPTVAYSVLVVAKVEKGKSKKLKSVKELLGITIMERSSFEKNPIDFLEA
KGYKEVKKDLIIKLPKYSLFELENGRKRMLASAGELQKGNELALPSKYVNFLYLASHYEKLK
GSPEDNEQKQLFVEQHKHYLDEIIEQISEFSKRVILADANLDKVLSAYNKHRDKPIREQAEN
IIHLFTLTNLGAPAAFKYEDTTIDRKRYTSTKEVLDATLIHQSITGLYETRIDLSQLGGDGG
GGSPKKKRKVDPKKKRKVDPKKKRKVGGSG
SEQ ID NO: 1171
Tet1v4-dCas9 DNA sequence (with three NLS sequences; Tet1v4 in bold; dCas9 in italics)
atggccctgcccacctgcagctgtcttgatcgagttatacaaaaagacaaaggcccatatta
tacacaccttggggcaggaccaagtgttgctgctgtcagggaaatcatggagaataggtatg
gtcaaaaaggaaacgcaataaggatagaaatagtagtgtacaccggtaaagaagggaaaagc
tctcatgggtgtccaattgctaagtgggttttaagaagaagcagtgatgaagaaaaagttct
ttgtttggtccggcagcgtacaggccaccactgtccaactgctgtgatggtggtgctcatca
tggtgtgggatggcatccctcttccaatggccgaccggctatacacagagctcacagagaat
ctaaagtcatacaatgggcaccctaccgacagaagatgcaccctcaatgaaaatcgtacctg
tacatgtcaaggaattgatccagagacttgtggagcttcattctcttttggctgttcatgga
gtatgtactttaatggctgtaagtttggtagaagcccaagccccagaagatttagaattgat
ccaagctctcccttacatgaaaaaaaccttgaagataacttacagagtttggctacacgatt
agctccaatttataagcagtatgctccagtagcttaccaaaatcaggtggaatatgaaaatg
ttgcccgagaatgtcggcttggcagcaaggaaggtcgacccttctctggggtcactgcttgc
ctggacttctgtgctcatccccacagggacattcacaacatgaataatggaagcactgtggt
ttgtaccttaactcgagaagataaccgctctttgggtgttattcctcaagatgagcagctcc
atgtgctacctctttataagctttcagacacagatgagtttggctccaaggaaggaatggaa
gccaagatcaaatctggggccatcgaggtcctggcaccccgccgcaaaaaaagaacgtgttt
cactcagcctgttccccgttctggaaagaagagggctgcgatgatgacagaggttcttgcac
ataagataagggcagtggaaaagaaacctattccccgaatcaagcggaagaataactcaaca
acaacaaacaacagtaagccttcgtcactgccaaccttagggagtaacactgagaccgtgca
acctgaagtaaaaagtgaaaccgaaccccattttatcttaaaaagttcagacaacactaaaa
cttattcgctgatgccatccgctcctcacccagtgaaagaggcatctccaggcttctcctgg
tccccgaagactgcttcagccacaccagctccactgaagaatgacgcaacagcctcatgcgg
gttttcagaaagaagcagcactccccactgtacgatgccttcgggaagactcagtggtgcca
atgctgcagctgctgatggccctggcatttcacagcttggcgaagtggctcctctccccacc
ctgtctgctcctgtgatggagcccctcattaattctgagccttccactggtgtgactgagcc
gctaacgcctcatcagccaaaccaccagccctccttcctcacctctcctcaagaccttgcct
cttctccaatggaagaagatgagcagcattctgaagcagatgagcctccatcagacgaaccc
ctatctgatgaccccctgtcacctgctgaggagaaattgccccacattgatgagtattggtc
agacagtgagcacatctttttggatgcaaatattggtggggtggccatcgcacctgctcacg
gctcggttttgattgagtgtgcccggcgagagctgcacgctaccactcctgttgagcacccc
aaccgtaatcatccaacccgcctctcccttgtcttttaccagcacaaaaacctaaataagcc
ccaacatggttttgaactaaacaagattaagtttgaggctaaagaagctaagaataagaaaa
tgaaggcctcagagcaaaaagaccaggcagctaatgaaggtccagaacagtcctctgaagta
aatgaattgaaccaaattccttctcataaagcattaacattaacccatgacaatgttgtcac
cgtgtccccttatgctctcacacacgttgcggggccctataaccattgggtcggagggccga
gctctggcgcacccccaccaagtggagggtctcctgccgggtccccaacatctactgaagaa
ggcaccagcgaatccgcaacgcccgagtcaggccctggtacctccacagaaccatctgaagg
tagtgcgcctggttccccagctggaagccctacttccaccgaagaaggcacgtcaaccgaac
caagtgaaggatctgcccctgggaccagcactgaaccatctgagatggacaagaagtattct
atcggactggccatcgggactaatagcgtcgggtgggccgtgatcactgacgagtacaaggt
gccctctaagaagttcaaggtgctcgggaacaccgaccggcattccatcaagaaaaatctga
tcggagctctcctctttgattcaggggagaccgctgaagcaacccgcctcaagcggactgct
agacggcggtacaccaggaggaagaaccggatttgttaccttcaagagatattctccaacga
aatggcaaaggtcgacgacagcttcttccataggctggaagaatcattcctcgtggaagagg
ataagaagcatgaacggcatcccatcttcggtaatatcgtcgacgaggtggcctatcacgag
aaatacccaaccatctaccatcttcgcaaaaagctggtggactcaaccgacaaggcagacct
ccggcttatctacctggccctggcccacatgatcaagttcagaggccacttcctgatcgagg
gcgacctcaatcctgacaatagcgatgtggataaactgttcatccagctggtgcagacttac
aaccagctctttgaagagaaccccatcaatgcaagcggagtcgatgccaaggccattctgtc
agcccggctgtcaaagagccgcagacttgagaatcttatcgctcagctgccgggtgaaaaga
aaaatggactgttcgggaacctgattgctctttcacttgggctgactcccaatttcaagtct
aatttcgacctggcagaggatgccaagctgcaactgtccaaggacacctatgatgacgatct
cgacaacctcctggcccagatcggtgaccaatacgccgaccttttccttgctgctaagaatc
tttctgacgccatcctgctgtctgacattctccgcgtgaacactgaaatcaccaaggcccct
ctttcagcttcaatgattaagcggtatgatgagcaccaccaggacctgaccctgcttaaggc
actcgtccggcagcagcttccggagaagtacaaggaaatcttctttgaccagtcaaagaatg
gatacgccggctacatcgacggaggtgcctcccaagaggaattttataagtttatcaaacct
atccttgagaagatggacggcaccgaagagctcctcgtgaaactgaatcgggaggatctgct
gcggaagcagcgcactttcgacaatgggagcattccccaccagatccatcttggggagcttc
acgccatccttcggcgccaagaggacttctacccctttcttaaggacaacagggagaagatt
gagaaaattctcactttccgcatcccctactacgtgggacccctcgccagaggaaatagccg
gtttgcttggatgaccagaaagtcagaagaaactatcactccctggaacttcgaagaggtgg
tggacaagggagccagcgctcagtcattcatcgaacggatgactaacttcgataagaacctc
cccaatgagaaggtcctgccgaaacattccctgctctacgagtactttaccgtgtacaacga
gctgaccaaggtgaaatatgtcaccgaagggatgaggaagcccgcattcctgtcaggcgaac
aaaagaaggcaattgtggaccttctgttcaagaccaatagaaaggtgaccgtgaagcagctg
aaggaggactatttcaagaaaattgaatgcttcgactctgtggagattagcggggtcgaaga
tcggttcaacgcaagcctgggtacctaccatgatctgcttaagatcatcaaggacaaggatt
ttctggacaatgaggagaacgaggacatccttgaggacattgtcctgactctcactctgttc
gaggaccgggaaatgatcgaggagaggcttaagacctacgcccatctgttcgacgataaagt
gatgaagcaacttaaacggagaagatataccggatggggacgccttagccgcaaactcatca
acggaatccgggacaaacagagcggaaagaccattcttgatttccttaaaagcgacggattc
gctaatcgcaacttcatgcaacttatccatgatgattccctgacctttaaggaggacatcca
gaaggcccaagtgtctggacaaggtgactcactgcacgagcatatcgcaaatctggctggtt
cacccgctattaagaagggtattctccagaccgtgaaagtcgtggacgagctggtcaaggtg
atgggtcgccataaaccagagaacattgtcatcgagatggccagggaaaaccagactaccca
gaagggacagaagaacagcagggagcggatgaaaagaattgaggaagggattaaggagctcg
ggtcacagatccttaaagagcacccggtggaaaacacccagcttcagaatgagaagctctat
ctgtactaccttcaaaatggacgcgatatgtatgtggaccaagagcttgatatcaacaggct
ctcagactacgacgtggacgccatcgtccctcagagcttcctcaaagacgactcaattgaca
ataaggtgctgactcgctcagacaagaaccggggaaagtcagataacgtgccctcagaggaa
gtcgtgaaaaagatgaagaactattggcgccagcttctgaacgcaaagctgatcactcagcg
gaagttcgacaatctcactaaggctgagaggggcggactgagcgaactggacaaagcaggat
tcattaaacggcaacttgtggagactcggcagattactaaacatgtcgcccaaatccttgac
tcacgcatgaataccaagtacgacgaaaacgacaaacttatccgcgaggtgaaggtgattac
cctgaagtccaagctggtcagcgatttcagaaaggactttcaattctacaaagtgcgggaga
tcaataactatcatcatgctcatgacgcatatctgaatgccgtggtgggaaccgccctgatc
aagaagtacccaaagctggaaagcgagttcgtgtacggagactacaaggtctacgacgtgcg
caagatgattgccaaatctgagcaggagatcggaaaggccaccgcaaagtacttcttctaca
gcaacatcatgaatttcttcaagaccgaaatcacccttgcaaacggtgagatccggaagagg
ccgctcatcgagactaatggggagactggcgaaatcgtgtgggacaagggcagagatttcgc
taccgtgcgcaaagtgctttctatgcctcaagtgaacatcgtgaagaaaaccgaggtgcaaa
ccggaggcttttctaaggaatcaatcctccccaagcgcaactccgacaagctcattgcaagg
aagaaggattgggaccctaagaagtacggcggattcgattcaccaactgtggcttattctgt
cctggtcgtggctaaggtggaaaaaggaaagtctaagaagctcaagagcgtgaaggaactgc
tgggtatcaccattatggagcgcagctccttcgagaagaacccaattgactttctcgaagcc
aaaggttacaaggaagtcaagaaggaccttatcatcaagctcccaaagtatagcctgttcga
actggagaatgggcggaagcggatgctcgcctccgctggcgaacttcagaagggtaatgagc
tggctctcccctccaagtacgtgaatttcctctaccttgcaagccattacgagaagctgaag
gggagccccgaggacaacgagcaaaagcaactgtttgtggagcagcataagcattatctgga
cgagatcattgagcagatttccgagttttctaaacgcgtcattctcgctgatgccaacctcg
ataaagtccttagcgcatacaataagcacagagacaaaccaattcgggagcaggctgagaat
atcatccacctgttcaccctcaccaatcttggtgcccctgccgcattcaagtacttcgacac
caccatcgaccggaaacgctatacctccaccaaagaagtgctggacgccaccctcatccacc
agagcatcaccggactttacgaaactcggattgacctctcacagctcggaggggatggtggc
ggaggctcgccaaaaaagaagagaaaggtagacccaaagaaaaaacgaaaagtagatccgaa
aaagaagaggaaggtgggaggtagtggg
SEQ ID NO: 1172
Tet1c-dCas9-Thy1.1 polypeptide sequence (SV40 NLS-Tet1 catalytic domain-dCas9-
nucleoplasmin NLS-T2A-mouse Thy1.1 reporter)
MVPKKKRKVGGGGSGSIPTCSCLDRVIQKDKGPYYTHLGAGPSVAAVREIMENRYGQKGNAI
RIEIVVYTGKEGKSSHGCPIAKWVLRRSSDEEKVLCLVRQRTGHHCPTAVMVVLIMVWDGIP
LPMADRLYTELTENLKSYNGHPTDRRCTINENRTCTCQGIDPETCGASFSEGCSWSMYENGC
KFGRSPSPRRFRIDPSSPLHEKNLEDNLQSLATRLAPIYKQYAPVAYQNQVEYENVARECRL
GSKEGRPFSGVTACLDFCAHPHRDIHNMNNGSTVVCTLTREDNRSLGVIPQDEQLHVLPLYK
LSDTDEFGSKEGMEAKIKSGAIEVLAPRRKKRTCFTQPVPRSGKKRAAMMTEVLAHKIRAVE
KKPIPRIKRKNNSTTTNNSKPSSLPTLGSNTETVQPEVKSETEPHFILKSSDNTKTYSIMPS
APHPVKEASPGFSWSPKTASATPAPLKNDATASCGFSERSSTPHCTMPSGRLSGANAAAADG
PGISQLGEVAPLPTLSAPVMEPLINSEPSTGVTEPLTPHQPNHQPSELTSPQDLASSPMEED
EQHSEADEPPSDEPLSDDPLSPAEEKLPHIDEYWSDSEHIFLDANIGGVAIAPAHGSVLIEC
ARRELHATTPVEHPNRNHPTRLSLVFYQHKNLNKPQHGFELNKIKFEAKEAKNKKMKASEQK
DQAANEGPEQSSEVNELNQIPSHKALTLTHDNVVTVSPYALTHVAGPYNHWVGRPFGGGGSM
DYKDHDGDYKDHDIDYKDDDDKMAPKKKRKVGIHGVPAADKKYSIGLAIGTNSVGWAVITDE
YKVPSKKFKVLGNTDRHSIKKNLIGALLFDSGETAEATRLKRTARRRYTRRKNRICYLQEIF
SNEMAKVDDSFFHRLEESFLVEEDKKHERHPIFGNIVDEVAYHEKYPTIYHLRKKLVDSTDK
ADLRLIYLALAHMIKFRGHFLIEGDLNPDNSDVDKLFIQLVQTYNQLFEENPINASGVDAKA
ILSARLSKSRRLENLIAQLPGEKKNGLFGNLIALSLGLTPNFKSNEDLAEDAKLQLSKDTYD
DDLDNLLAQIGDQYADLFLAAKNLSDAILLSDILRVNTEITKAPLSASMIKRYDEHHQDLTL
LKALVRQQLPEKYKEIFFDQSKNGYAGYIDGGASQEEFYKFIKPILEKMDGTEELLVKINRE
DLLRKQRTFDNGSIPHQIHLGELHAILRRQEDFYPELKDNREKIEKILTFRIPYYVGPLARG
NSRFAWMTRKSEETITPWNFEEVVDKGASAQSFIERMINEDKNLPNEKVLPKHSLLYEYFTV
YNELTKVKYVTEGMRKPAFLSGEQKKAIVDLLFKTNRKVTVKQLKEDYFKKIECFDSVEISG
VEDRENASLGTYHDLLKIIKDKDELDNEENEDILEDIVLTLTLFEDREMIEERLKTYAHLED
DKVMKQLKRRRYTGWGRISRKLINGIRDKQSGKTILDELKSDGFANRNFMQLIHDDSLTFKE
DIQKAQVSGQGDSLHEHIANLAGSPAIKKGILQTVKVVDELVKVMGRHKPENIVIEMARENQ
TTQKGQKNSRERMKRIEEGIKELGSQILKEHPVENTQLQNEKLYLYYLQNGRDMYVDQELDI
NRLSDYDVDAIVPQSELKDDSIDNKVLTRSDKNRGKSDNVPSEEVVKKMKNYWRQLLNAKLI
TQRKEDNLTKAERGGLSELDKAGFIKRQLVETRQITKHVAQILDSRMNTKYDENDKLIREVK
VITLKSKLVSDERKDEQFYKVREINNYHHAHDAYLNAVVGTALIKKYPKLESEFVYGDYKVY
DVRKMIAKSEQEIGKATAKYFFYSNIMNFFKTEITLANGEIRKRPLIETNGETGEIVWDKGR
DFATVRKVLSMPQVNIVKKTEVQTGGFSKESILPKRNSDKLIARKKDWDPKKYGGEDSPTVA
YSVLVVAKVEKGKSKKLKSVKELLGITIMERSSFEKNPIDFLEAKGYKEVKKDLIIKLPKYS
LFELENGRKRMLASAGELQKGNELALPSKYVNFLYLASHYEKLKGSPEDNEQKQLFVEQHKH
YLDEIIEQISEFSKRVILADANLDKVLSAYNKHRDKPIREQAENIIHLFTLINLGAPAAFKY
FDTTIDRKRYTSTKEVLDATLIHQSITGLYETRIDLSQLGGDKRPAATKKAGQAKKKKGGDF
GASEGRGSLLTCGDVEENPGPGTMNPAISVALLLSVLQVSRGQKVTSLTACLVNQNLRLDCR
HENNTKDNSIQHEFSLTREKRKHVISGTLGIPEHTYRSRVTLSNQPYIKVLTLANFTTKDEG
DYFCELRVSGANPMSSNKSISVYRDKLVKCGGISLLVQNTSWMLLLLLSLSLLQALDFISL*
SEQ ID NO: 1173
Tet1c-dCas9-Thy1.1 DNA sequence (SV40 NLS-Tet1 catalytic domain-dCas9-
nucleoplasmin NLS-T2A-mouse Thy1.1 reporter)
atggtgCCAAAAAAGAAGAGAAAGGTAggcggagGCGGGAGCGGATCCCTGCCCACCTGCAG
CTGTCTTGATCGAGTTATACAAAAAGACAAAGGCCCATATTATACACACCTTGGGGCAGGAC
CAAGTGTTGCTGCTGTCAGGGAAATCATGGAGAATAGGTATGGTCAAAAAGGAAACGCAATA
AGGATAGAAATAGTAGTGTACACCGGTAAAGAAGGGAAAAGCTCTCATGGGTGTCCAATTGC
TAAGTGGGTTTTAAGAAGAAGCAGTGATGAAGAAAAAGTTCTTTGTTTGGTCCGGCAGCGTA
CAGGCCACCACTGTCCAACTGCTGTGATGGTGGTGCTCATCATGGTGTGGGATGGCATCCCT
CTTCCAATGGCCGACCGGCTATACACAGAGCTCACAGAGAATCTAAAGTCATACAATGGGCA
CCCTACCGACAGAAGATGCACCCTCAATGAAAATCGTACCTGTACATGTCAAGGAATTGATC
CAGAGACTTGTGGAGCTTCATTCTCTTTTGGCTGTTCATGGAGTATGTACTTTAATGGCTGT
AAGTTTGGTAGAAGCCCAAGCCCCAGAAGATTTAGAATTGATCCAAGCTCTCCCTTACATGA
AAAAAACCTTGAAGATAACTTACAGAGTTTGGCTACACGATTAGCTCCAATTTATAAGCAGT
ATGCTCCAGTAGCTTACCAAAATCAGGTGGAATATGAAAATGTTGCCCGAGAATGTCGGCTT
GGCAGCAAGGAAGGTCGACCCTTCTCTGGGGTCACTGCTTGCCTGGACTTCTGTGCTCATCC
CCACAGGGACATTCACAACATGAATAATGGAAGCACTGTGGTTTGTACCTTAACTCGAGAAG
ATAACCGCTCTTTGGGTGTTATTCCTCAAGATGAGCAGCTCCATGTGCTACCTCTTTATAAG
CTTTCAGACACAGATGAGTTTGGCTCCAAGGAAGGAATGGAAGCCAAGATCAAATCTGGGGC
CATCGAGGTCCTGGCACCCCGCCGCAAAAAAAGAACGTGTTTCACTCAGCCTGTTCCCCGTT
CTGGAAAGAAGAGGGCTGCGATGATGACAGAGGTTCTTGCACATAAGATAAGGGCAGTGGAA
AAGAAACCTATTCCCCGAATCAAGCGGAAGAATAACTCAACAACAACAAACAACAGTAAGCC
TTCGTCACTGCCAACCTTAGGGAGTAACACTGAGACCGTGCAACCTGAAGTAAAAAGTGAAA
CCGAACCCCATTTTATCTTAAAAAGTTCAGACAACACTAAAACTTATTCGCTGATGCCATCC
GCTCCTCACCCAGTGAAAGAGGCATCTCCAGGCTTCTCCTGGTCCCCGAAGACTGCTTCAGC
CACACCAGCTCCACTGAAGAATGACGCAACAGCCTCATGCGGGTTTTCAGAAAGAAGCAGCA
CTCCCCACTGTACGATGCCTTCGGGAAGACTCAGTGGTGCCAATGCTGCAGCTGCTGATGGC
CCTGGCATTTCACAGCTTGGCGAAGTGGCTCCTCTCCCCACCCTGTCTGCTCCTGTGATGGA
GCCCCTCATTAATTCTGAGCCTTCCACTGGTGTGACTGAGCCGCTAACGCCTCATCAGCCAA
ACCACCAGCCCTCCTTCCTCACCTCTCCTCAAGACCTTGCCTCTTCTCCAATGGAAGAAGAT
GAGCAGCATTCTGAAGCAGATGAGCCTCCATCAGACGAACCCCTATCTGATGACCCCCTGTC
ACCTGCTGAGGAGAAATTGCCCCACATTGATGAGTATTGGTCAGACAGTGAGCACATCTTTT
TGGATGCAAATATTGGTGGGGTGGCCATCGCACCTGCTCACGGCTCGGTTTTGATTGAGTGT
GCCCGGCGAGAGCTGCACGCTACCACTCCTGTTGAGCACCCCAACCGTAATCATCCAACCCG
CCTCTCCCTTGTCTTTTACCAGCACAAAAACCTAAATAAGCCCCAACATGGTTTTGAACTAA
ACAAGATTAAGTTTGAGGCTAAAGAAGCTAAGAATAAGAAAATGAAGGCCTCAGAGCAAAAA
GACCAGGCAGCTAATGAAGGTCCAGAACAGTCCTCTGAAGTAAATGAATTGAACCAAATTCC
TTCTCATAAAGCATTAACATTAACCCATGACAATGTTGTCACCGTGTCCCCTTATGCTCTCA
CACACGTTGCGGGGCCCTATAAccattgggtcggccggccattcggtggaggtggctCCATG
GACTATAAGGACCACGACGGAGACTACAAGGATCATGATATTGATTACAAAGACGATGACGA
TAAGATGGCCCCAAAGAAGAAGCGGAAGGTCGGTATCCACGGAGTCCCAGCAGCCGACAAGA
AGTACAGCATCGGCCTGGCCATCGGCACCAACTCTGTGGGCTGGGCCGTGATCACCGACGAG
TACAAGGTGCCCAGCAAGAAATTCAAGGTGCTGGGCAACACCGACCGGCACAGCATCAAGAA
GAACCTGATCGGAGCCCTGCTGTTCGACAGCGGCGAAACAGCCGAGGCCACCCGGCTGAAGA
GAACCGCCAGAAGAAGATACACCAGACGGAAGAACCGGATCTGCTATCTGCAAGAGATCTTC
AGCAACGAGATGGCCAAGGTGGACGACAGCTTCTTCCACAGACTGGAAGAGTCCTTCCTGGT
GGAAGAGGATAAGAAGCACGAGCGGCACCCCATCTTCGGCAACATCGTGGACGAGGTGGCCT
ACCACGAGAAGTACCCCACCATCTACCACCTGAGAAAGAAACTGGTGGACAGCACCGACAAG
GCCGACCTGCGGCTGATCTATCTGGCCCTGGCCCACATGATCAAGTTCCGGGGCCACTTCCT
GATCGAGGGCGACCTGAACCCCGACAACAGCGACGTGGACAAGCTGTTCATCCAGCTGGTGC
AGACCTACAACCAGCTGTTCGAGGAAAACCCCATCAACGCCAGCGGCGTGGACGCCAAGGCC
ATCCTGTCTGCCAGACTGAGCAAGAGCAGACGGCTGGAAAATCTGATCGCCCAGCTGCCCGG
CGAGAAGAAGAATGGCCTGTTCGGAAACCTGATTGCCCTGAGCCTGGGCCTGACCCCCAACT
TCAAGAGCAACTTCGACCTGGCCGAGGATGCCAAACTGCAGCTGAGCAAGGACACCTACGAC
GACGACCTGGACAACCTGCTGGCCCAGATCGGCGACCAGTACGCCGACCTGTTTCTGGCCGC
CAAGAACCTGTCCGACGCCATCCTGCTGAGCGACATCCTGAGAGTGAACACCGAGATCACCA
AGGCCCCCCTGAGCGCCTCTATGATCAAGAGATACGACGAGCACCACCAGGACCTGACCCTG
CTGAAAGCTCTCGTGCGGCAGCAGCTGCCTGAGAAGTACAAAGAGATTTTCTTCGACCAGAG
CAAGAACGGCTACGCCGGCTACATTGACGGCGGAGCCAGCCAGGAAGAGTTCTACAAGTTCA
TCAAGCCCATCCTGGAAAAGATGGACGGCACCGAGGAACTGCTCGTGAAGCTGAACAGAGAG
GACCTGCTGCGGAAGCAGCGGACCTTCGACAACGGCAGCATCCCCCACCAGATCCACCTGGG
AGAGCTGCACGCCATTCTGCGGCGGCAGGAAGATTTTTACCCATTCCTGAAGGACAACCGGG
AAAAGATCGAGAAGATCCTGACCTTCCGCATCCCCTACTACGTGGGCCCTCTGGCCAGGGGA
AACAGCAGATTCGCCTGGATGACCAGAAAGAGCGAGGAAACCATCACCCCCTGGAACTTCGA
GGAAGTGGTGGACAAGGGCGCTTCCGCCCAGAGCTTCATCGAGCGGATGACCAACTTCGATA
AGAACCTGCCCAACGAGAAGGTGCTGCCCAAGCACAGCCTGCTGTACGAGTACTTCACCGTG
TATAACGAGCTGACCAAAGTGAAATACGTGACCGAGGGAATGAGAAAGCCCGCCTTCCTGAG
CGGCGAGCAGAAAAAGGCCATCGTGGACCTGCTGTTCAAGACCAACCGGAAAGTGACCGTGA
AGCAGCTGAAAGAGGACTACTTCAAGAAAATCGAGTGCTTCGACTCCGTGGAAATCTCCGGC
GTGGAAGATCGGTTCAACGCCTCCCTGGGCACATACCACGATCTGCTGAAAATTATCAAGGA
CAAGGACTTCCTGGACAATGAGGAAAACGAGGACATTCTGGAAGATATCGTGCTGACCCTGA
CACTGTTTGAGGACAGAGAGATGATCGAGGAACGGCTGAAAACCTATGCCCACCTGTTCGAC
GACAAAGTGATGAAGCAGCTGAAGCGGCGGAGATACACCGGCTGGGGCAGGCTGAGCCGGAA
GCTGATCAACGGCATCCGGGACAAGCAGTCCGGCAAGACAATCCTGGATTTCCTGAAGTCCG
ACGGCTTCGCCAACAGAAACTTCATGCAGCTGATCCACGACGACAGCCTGACCTTTAAAGAG
GACATCCAGAAAGCCCAGGTGTCCGGCCAGGGCGATAGCCTGCACGAGCACATTGCCAATCT
GGCCGGCAGCCCCGCCATTAAGAAGGGCATCCTGCAGACAGTGAAGGTGGTGGACGAGCTCG
TGAAAGTGATGGGCCGGCACAAGCCCGAGAACATCGTGATCGAAATGGCCAGAGAGAACCAG
ACCACCCAGAAGGGACAGAAGAACAGCCGCGAGAGAATGAAGCGGATCGAAGAGGGCATCAA
AGAGCTGGGCAGCCAGATCCTGAAAGAACACCCCGTGGAAAACACCCAGCTGCAGAACGAGA
AGCTGTACCTGTACTACCTGCAGAATGGGGGGGATATGTACGTGGACCAGGAACTGGACATC
AACCGGCTGTCCGACTACGATGTGGACGCCATCGTGCCTCAGAGCTTTCTGAAGGACGACTC
CATCGACAACAAGGTGCTGACCAGAAGCGACAAGAACCGGGGCAAGAGCGACAACGTGCCCT
CCGAAGAGGTCGTGAAGAAGATGAAGAACTACTGGGGGCAGCTGCTGAACGCCAAGCTGATT
ACCCAGAGAAAGTTCGACAATCTGACCAAGGCCGAGAGAGGCGGCCTGAGCGAACTGGATAA
GGCCGGCTTCATCAAGAGACAGCTGGTGGAAACCCGGCAGATCACAAAGCACGTGGCACAGA
TCCTGGACTCCCGGATGAACACTAAGTACGACGAGAATGACAAGCTGATCCGGGAAGTGAAA
GTGATCACCCTGAAGTCCAAGCTGGTGTCCGATTTCCGGAAGGATTTCCAGTTTTACAAAGT
GCGCGAGATCAACAACTACCACCACGCCCACGACGCCTACCTGAACGCCGTCGTGGGAACCG
CCCTGATCAAAAAGTACCCTAAGCTGGAAAGCGAGTTCGTGTACGGCGACTACAAGGTGTAC
GACGTGCGGAAGATGATCGCCAAGAGCGAGCAGGAAATCGGCAAGGCTACCGCCAAGTACTT
CTTCTACAGCAACATCATGAACTTTTTCAAGACCGAGATTACCCTGGCCAACGGCGAGATCC
GGAAGCGGCCTCTGATCGAGACAAACGGCGAAACCGGGGAGATCGTGTGGGATAAGGGCCGG
GATTTTGCCACCGTGCGGAAAGTGCTGAGCATGCCCCAAGTGAATATCGTGAAAAAGACCGA
GGTGCAGACAGGCGGCTTCAGCAAAGAGTCTATCCTGCCCAAGAGGAACAGCGATAAGCTGA
TCGCCAGAAAGAAGGACTGGGACCCTAAGAAGTACGGCGGCTTCGACAGCCCCACCGTGGCC
TATTCTGTGCTGGTGGTGGCCAAAGTGGAAAAGGGCAAGTCCAAGAAACTGAAGAGTGTGAA
AGAGCTGCTGGGGATCACCATCATGGAAAGAAGCAGCTTCGAGAAGAATCCCATCGACTTTC
TGGAAGCCAAGGGCTACAAAGAAGTGAAAAAGGACCTGATCATCAAGCTGCCTAAGTACTCC
CTGTTCGAGCTGGAAAACGGCCGGAAGAGAATGCTGGCCTCTGCCGGCGAACTGCAGAAGGG
AAACGAACTGGCCCTGCCCTCCAAATATGTGAACTTCCTGTACCTGGCCAGCCACTATGAGA
AGCTGAAGGGCTCCCCCGAGGATAATGAGCAGAAACAGCTGTTTGTGGAACAGCACAAGCAC
TACCTGGACGAGATCATCGAGCAGATCAGCGAGTTCTCCAAGAGAGTGATCCTGGCCGACGC
TAATCTGGACAAAGTGCTGTCCGCCTACAACAAGCACCGGGATAAGCCCATCAGAGAGCAGG
CCGAGAATATCATCCACCTGTTTACCCTGACCAATCTGGGAGCCCCTGCCGCCTTCAAGTAC
TTTGACACCACCATCGACCGGAAGAGGTACACCAGCACCAAAGAGGTGCTGGACGCCACCCT
GATCCACCAGAGCATCACCGGCCTGTACGAGACACGGATCGACCTGTCTCAGCTGGGAGGCG
ACAAAAGGCCGGCGGCCACGAAAAAGGccggacaggccaaaaagaaaaagGGCggagatttc
ggcGctagCGAGGGCAGAGGAAGTCTTCTAACATGCGGTGACGTGGAGGAGAATCCCGGCCC
TGgtacCatgaacccagccatcagcgtcgctctcctgctctcagtcttgcaggtgtcccgag
ggcagaaggtgaccagcctgacagcctgcctggtgaaccaaaaccttcgcctggactgccgc
catgagaataacaccaaggataactccatccagcatgagttcagcctgacccgagagaagag
gaagcacgtgctctcaggcacccttgggatacccgagcacacgtaccgctcccgcgtcaccc
tctccaaccagccctatatcaaggtccttaccctagccaacttcaccaccaaggatgagggc
gactacttttgtgagcttcgcgtttcgggcgcgaatcccatgagctccaataaaagtatcag
tgtgtatagagacaagctggtcaagtgtggcggcataagcctgctggttcagaacacatcct
ggatgctgctgctgctgctttccctctccctcctccaagccctggacttcatttctctgtga
SEQ ID NO: 1174
Tet1v4-dCas9-Thy1.1 polypeptide sequence ((Tet1v4-dCas9-Thy1.1; modified slightly from
construct previously published as Tet1v4 in Nunez et al. Cell 2021, 184, 2503-2519)
MALPTCSCLDRVIQKDKGPYYTHLGAGPSVAAVREIMENRYGQKGNAIRIEIVVYTGKEGKS
SHGCPIAKWVLRRSSDEEKVLCLVRQRTGHHCPTAVMVVLIMVWDGIPLPMADRLYTELTEN
LKSYNGHPTDRRCTLNENRTCTCQGIDPETCGASESFGCSWSMYENGCKEGRSPSPRRFRID
PSSPLHEKNLEDNLQSLATRLAPIYKQYAPVAYQNQVEYENVARECRLGSKEGRPFSGVTAC
LDFCAHPHRDIHNMNNGSTVVCTLTREDNRSLGVIPQDEQLHVLPLYKLSDTDEFGSKEGME
AKIKSGAIEVLAPRRKKRTCFTQPVPRSGKKRAAMMTEVLAHKIRAVEKKPIPRIKRKNNST
TTNNSKPSSLPTLGSNTETVQPEVKSETEPHFILKSSDNTKTYSLMPSAPHPVKEASPGFSW
SPKTASATPAPLKNDATASCGFSERSSTPHCTMPSGRLSGANAAAADGPGISQLGEVAPLPT
LSAPVMEPLINSEPSTGVTEPLTPHQPNHQPSFLTSPQDLASSPMEEDEQHSEADEPPSDEP
LSDDPLSPAREKLPHIDEYWSDSEHIFLDANIGGVAIAPAHGSVLIECARRELHATTPVEHP
NRNHPTRLSLVFYQHKNLNKPQHGFELNKIKFEAKEAKNKKMKASEQKDQAANEGPEQSSEV
NELNQIPSHKALTLTHDNVVTVSPYALTHVAGPYNHWVGGPSSGAPPPSGGSPAGSPTSTEE
GTSESATPESGPGTSTEPSEGSAPGSPAGSPISTEEGTSTEPSEGSAPGTSTEPSEMDKKYS
IGLAIGTNSVGWAVITDEYKVPSKKFKVIGNTDRHSIKKNLIGALLEDSGETAEATRLKRTA
RRRYTRRKNRICYLQEIFSNEMAKVDDSFFHRLEESFLVEEDKKHERHPIFGNIVDEVAYHE
KYPTIYHLRKKLVDSTDKADLRLIYLALAHMIKFRGHFLIEGDLNPDNSDVDKLFIQLVQTY
NQLFEENPINASGVDAKAILSARLSKSRRLENLIAQLPGEKKNGLEGNLIALSLGLTPNEKS
NEDLAEDAKLQLSKDTYDDDLDNLLAQIGDQYADLFLAAKNLSDAILLSDILRVNTEITKAP
LSASMIKRYDEHHQDLTILKALVRQQLPEKYKEIFFDQSKNGYAGYIDGGASQEEFYKFIKP
ILEKMDGTEELLVKINREDLLRKQRTEDNGSIPHQIHLGELHAILRRQEDFYPFLKDNREKI
EKILTFRIPYYVGPLARGNSRFAWMTRKSEETITPWNFEEVVDKGASAQSFIERMINEDKNL
PNEKVLPKHSLLYEYFTVYNELTKVKYVTEGMRKPAFLSGEQKKAIVDLLEKTNRKVTVKQL
KEDYFKKIECFDSVEISGVEDRENASLGTYHDLLKIIKDKDELDNEENEDILEDIVLTLTLE
EDREMIEERLKTYAHLEDDKVMKQLKRRRYTGWGRLSRKLINGIRDKQSGKTILDELKSDGF
ANRNFMQLIHDDSLTFKEDIQKAQVSGQGDSLHEHIANLAGSPAIKKGILQTVKVVDELVKV
MGRHKPENIVIEMARENQTTQKGQKNSRERMKRIEEGIKELGSQILKEHPVENTQLQNEKLY
LYYLQNGRDMYVDQELDINRLSDYDVDAIVPQSFLKDDSIDNKVLTRSDKNRGKSDNVPSEE
VVKKMKNYWRQLLNAKLITQRKEDNLTKAERGGLSELDKAGFIKRQLVETRQITKHVAQILD
SRMNTKYDENDKLIREVKVITLKSKLVSDFRKDFQFYKVREINNYHHAHDAYLNAVVGTALI
KKYPKLESEFVYGDYKVYDVRKMIAKSEQEIGKATAKYFFYSNIMNFFKTEITLANGEIRKR
PLIETNGETGEIVWDKGRDFATVRKVLSMPQVNIVKKTEVQTGGFSKESILPKRNSDKLIAR
KKDWDPKKYGGFDSPTVAYSVLVVAKVEKGKSKKLKSVKELLGITIMERSSFEKNPIDFLEA
KGYKEVKKDLIIKLPKYSLFELENGRKRMLASAGELQKGNELALPSKYVNFLYLASHYEKLK
GSPEDNEQKQLFVEQHKHYLDEIIEQISEFSKRVILADANLDKVLSAYNKHRDKPIREQAEN
IIHLETLINIGAPAAFKYEDTTIDRKRYTSTKEVLDATLIHQSITGLYETRIDLSQLGGDGG
GGSPKKKRKVDPKKKRKVDPKKKRKVGGSGATNFSLLKQAGDVEENPGPMNPAISVALLISV
LQVSRGQKVTSLTACLVNQNLRLDCRHENNTKDNSIQHEFSLTREKRKHVLSGTIGIPEHTY
RSRVTLSNQPYIKVLTLANFTTKDEGDYFCELRVSGANPMSSNKSISVYRDKLVKCGGISLL
VQNTSWMLLLLLSLSLLQALDFISL*
SEQ ID NO: 1175
Tet1v4-dCas9-Thy1.1 DNA sequence (Tet1v4-dCas9-Thy1.1; modified slightly from
construct previously published as Tet1v4 in Nunez et al. Cell 2021, 184, 2503-2519)
CTGCCCACctgcagctgtcttgatcgagttatacaaaaagacaaaggcccatattatacaca
ccttggggcaggaccaagtgttgctgctgtcagggaaatcatggagaataggtatggtcaaa
aaggaaacgcaataaggatagaaatagtagtgtacaccggtaaagaagggaaaagctctcat
gggtgtccaattgctaagtgggttttaagaagaagcagtgatgaagaaaaagttctttgttt
ggtccggcagcgtacaggccaccactgtccaactgctgtgatggtggtgctcatcatggtgt
gggatggcatccctcttccaatggccgaccggctatacacagagctcacagagaatctaaag
tcatacaatgggcaccctaccgacagaagatgcaccctcaatgaaaatcgtacctgtacatg
tcaaggaattgatccagagacttgtggagcttcattctcttttggctgttcatggagtatgt
actttaatggctgtaagtttggtagaagcccaagccccagaagatttagaattgatccaagc
tctcccttacatgaaaaaaaccttgaagataacttacagagtttggctacacgattagctcc
aatttataagcagtatgctccagtagcttaccaaaatcaggtggaatatgaaaatgttgccc
gagaatgtcggcttggcagcaaggaaggtcgacccttctctggggtcactgcttgcctggac
ttctgtgctcatccccacagggacattcacaacatgaataatggaagcactgtggtttgtac
cttaactcgagaagataaccgctctttgggtgttattcctcaagatgagcagctccatgtgc
tacctctttataagctttcagacacagatgagtttggctccaaggaaggaatggaagccaag
atcaaatctggggccatcgaggtcctggcaccccgccgcaaaaaaagaacgtgtttcactca
gcctgttccccgttctggaaagaagagggctgcgatgatgacagaggttcttgcacataaga
taagggcagtggaaaagaaacctattccccgaatcaagcggaagaataactcaacaacaaca
aacaacagtaagccttcgtcactgccaaccttagggagtaacactgagaccgtgcaacctga
agtaaaaagtgaaaccgaaccccattttatcttaaaaagttcagacaacactaaaacttatt
cgctgatgccatccgctcctcacccagtgaaagaggcatctccaggcttctcctggtccccg
aagactgcttcagccacaccagctccactgaagaatgacgcaacagcctcatgcgggttttc
agaaagaagcagcactccccactgtacgatgccttcgggaagactcagtggtgccaatgctg
cagctgctgatggccctggcatttcacagcttggcgaagtggctcctctccccaccctgtct
gctcctgtgatggagcccctcattaattctgagccttccactggtgtgactgagccgctaac
gcctcatcagccaaaccaccagccctccttcctcacctctcctcaagaccttgcctcttctc
caatggaagaagatgagcagcattctgaagcagatgagcctccatcagacgaacccctatct
gatgaccccctgtcacctgctgaggagaaattgccccacattgatgagtattggtcagacag
tgagcacatctttttggatgcaaatattggtggggtggccatcgcacctgctcacggctcgg
ttttgattgagtgtgcccggcgagagctgcacgctaccactcctgttgagcaccccaaccgt
aatcatccaacccgcctctcccttgtcttttaccagcacaaaaacctaaataagccccaaca
tggttttgaactaaacaagattaagtttgaggctaaagaagctaagaataagaaaatgaagg
cctcagagcaaaaagaccaggcagctaatgaaggtccagaacagtcctctgaagtaaatgaa
ttgaaccaaattccttctcataaagcattaacattaacccatgacaatgttgtcaccgtgtc
cccttatgctctcacacacgttgcggggccctataaccattgggtcggagggccgagctctg
gcgcacccccaccaagtggagggtctcctgccgggtccccaacatctactgaagaaggcacc
agcgaatccgcaacgcccgagtcaggccctggtacctccacagaaccatctgaaggtagtgc
gcctggttccccagctggaagccctacttccaccgaagaaggcacgtcaaccgaaccaagtg
aaggatctgcccctgggaccagcactgaaccatctgagatggacaagaagtattctatcgga
ctggccatcgggactaatagcgtcgggtgggccgtgatcactgacgagtacaaggtgccctc
taagaagttcaaggtgctcgggaacaccgaccggcattccatcaagaaaaatctgatcggag
ctctcctctttgattcaggggagaccgctgaagcaacccgcctcaagcggactgctagacgg
cggtacaccaggaggaagaaccggatttgttaccttcaagagatattctccaacgaaatggc
aaaggtcgacgacagcttcttccataggctggaagaatcattcctcgtggaagaggataaga
agcatgaacggcatcccatcttcggtaatatcgtcgacgaggtggcctatcacgagaaatac
ccaaccatctaccatcttcgcaaaaagctggtggactcaaccgacaaggcagacctccggct
tatctacctggccctggcccacatgatcaagttcagaggccacttcctgatcgagggcgacc
tcaatcctgacaatagcgatgtggataaactgttcatccagctggtgcagacttacaaccag
ctctttgaagagaaccccatcaatgcaagcggagtcgatgccaaggccattctgtcagcccg
gctgtcaaagagccgcagacttgagaatcttatcgctcagctgccgggtgaaaagaaaaatg
gactgttcgggaacctgattgctctttcacttgggctgactcccaatttcaagtctaatttc
gacctggcagaggatgccaagctgcaactgtccaaggacacctatgatgacgatctcgacaa
cctcctggcccagatcggtgaccaatacgccgaccttttccttgctgctaagaatctttctg
acgccatcctgctgtctgacattctccgcgtgaacactgaaatcaccaaggcccctctttca
gcttcaatgattaagcggtatgatgagcaccaccaggacctgaccctgcttaaggcactcgt
ccggcagcagcttccggagaagtacaaggaaatcttctttgaccagtcaaagaatggatacg
ccggctacatcgacggaggtgcctcccaagaggaattttataagtttatcaaacctatcctt
gagaagatggacggcaccgaagagctcctcgtgaaactgaatcgggaggatctgctgcggaa
gcagcgcactttcgacaatgggagcattccccaccagatccatcttggggagcttcacgcca
tccttcggcgccaagaggacttctacccctttcttaaggacaacagggagaagattgagaaa
attctcactttccgcatcccctactacgtgggacccctcgccagaggaaatagccggtttgc
ttggatgaccagaaagtcagaagaaactatcactccctggaacttcgaagaggtggtggaca
agggagccagcgctcagtcattcatcgaacggatgactaacttcgataagaacctccccaat
gagaaggtcctgccgaaacattccctgctctacgagtactttaccgtgtacaacgagctgac
caaggtgaaatatgtcaccgaagggatgaggaagcccgcattcctgtcaggcgaacaaaaga
aggcaattgtggaccttctgttcaagaccaatagaaaggtgaccgtgaagcagctgaaggag
gactatttcaagaaaattgaatgcttcgactctgtggagattagcggggtcgaagatcggtt
caacgcaagcctgggtacctaccatgatctgcttaagatcatcaaggacaaggattttctgg
acaatgaggagaacgaggacatccttgaggacattgtcctgactctcactctgttcgaggac
cgggaaatgatcgaggagaggcttaagacctacgcccatctgttcgacgataaagtgatgaa
gcaacttaaacggagaagatataccggatggggacgccttagccgcaaactcatcaacggaa
tccgggacaaacagagcggaaagaccattcttgatttccttaaaagcgacggattcgctaat
cgcaacttcatgcaacttatccatgatgattccctgacctttaaggaggacatccagaaggc
ccaagtgtctggacaaggtgactcactgcacgagcatatcgcaaatctggctggttcacccg
ctattaagaagggtattctccagaccgtgaaagtcgtggacgagctggtcaaggtgatgggt
cgccataaaccagagaacattgtcatcgagatggccagggaaaaccagactacccagaaggg
acagaagaacagcagggagcggatgaaaagaattgaggaagggattaaggagctcgggtcac
agatccttaaagagcacccggtggaaaacacccagcttcagaatgagaagctctatctgtac
taccttcaaaatggacgcgatatgtatgtggaccaagagcttgatatcaacaggctctcaga
ctacgacgtggacgccatcgtccctcagagcttcctcaaagacgactcaattgacaataagg
tgctgactcgctcagacaagaaccggggaaagtcagataacgtgccctcagaggaagtcgtg
aaaaagatgaagaactattggcgccagcttctgaacgcaaagctgatcactcagcggaagtt
cgacaatctcactaaggctgagaggggcggactgagcgaactggacaaagcaggattcatta
aacggcaacttgtggagactcggcagattactaaacatgtcgcccaaatccttgactcacgc
atgaataccaagtacgacgaaaacgacaaacttatccgcgaggtgaaggtgattaccctgaa
gtccaagctggtcagcgatttcagaaaggactttcaattctacaaagtgcgggagatcaata
actatcatcatgctcatgacgcatatctgaatgccgtggtgggaaccgccctgatcaagaag
tacccaaagctggaaagcgagttcgtgtacggagactacaaggtctacgacgtgcgcaagat
gattgccaaatctgagcaggagatcggaaaggccaccgcaaagtacttcttctacagcaaca
tcatgaatttcttcaagaccgaaatcacccttgcaaacggtgagatccggaagaggccgctc
atcgagactaatggggagactggcgaaatcgtgtgggacaagggcagagatttcgctaccgt
gcgcaaagtgctttctatgcctcaagtgaacatcgtgaagaaaaccgaggtgcaaaccggag
gcttttctaaggaatcaatcctccccaagcgcaactccgacaagctcattgcaaggaagaag
gattgggaccctaagaagtacggcggattcgattcaccaactgtggcttattctgtcctggt
cgtggctaaggtggaaaaaggaaagtctaagaagctcaagagcgtgaaggaactgctgggta
tcaccattatggagcgcagctccttcgagaagaacccaattgactttctcgaagccaaaggt
tacaaggaagtcaagaaggaccttatcatcaagctcccaaagtatagcctgttcgaactgga
gaatgggcggaagcggatgctcgcctccgctggcgaacttcagaagggtaatgagctggctc
tcccctccaagtacgtgaatttcctctaccttgcaagccattacgagaagctgaaggggagc
cccgaggacaacgagcaaaagcaactgtttgtggagcagcataagcattatctggacgagat
cattgagcagatttccgagttttctaaacgcgtcattctcgctgatgccaacctcgataaag
tccttagcgcatacaataagcacagagacaaaccaattcgggagcaggctgagaatatcatc
cacctgttcaccctcaccaatcttggtgcccctgccgcattcaagtacttcgacaccaccat
cgaccggaaacgctatacctccaccaaagaagtgctggacgccaccctcatccaccagagca
tcaccggactttacgaaactcggattgacctctcacagctcggaggggatggtggcggaggc
tcgccaaaaaagaagagaaaggtagacccaaagaaaaaacgaaaagtagatccgaaaaagaa
gaggaaggtgggaggtagtggggctactaacttcagcctgctgaagcaggctggagacgtgg
aggagaaccctggacctATGAACCCAGCCATCAGcgtcgctctcctgctctcagtcttgcag
gtgtcccgagggcagaaggtgaccagcctgacagcctgcctggtgaaccaaaaccttcgcct
ggactgccgccatgagaataacaccaaggataactccatccagcatgagttcagcctgaccc
gagagaagaggaagcacgtgctctcaggcacccttgggatacccgagcacacgtaccgctcc
cgcgtcaccctctccaaccagccctatatcaaggtccttaccctagccaacttcaccaccaa
ggatgagggcgactacttttgtgagcttcgcgtttcgggcgcgaatcccatgagctccaata
aaagtatcagtgtgtatagagacaagctggtcaagtgtggcggcataagcctgctggttcag
aacacatcctggatgctgctgctgctgctttccctctccctcctccaagcCCTGGACTTCAT
TTCTCTGTGA
SEQ ID NO: 1176
Polypeptide sequence of KRAB protein
RTLVTFKDVFVDFTREEWKLLDTAQQILYRNVMLENYKNIVSLGYQLTKPDVILRLEKGEEP
WLV
SEQ ID NO: 1177
Polynucleotide sequence for KRAB
cggacactggtgaccttcaaggatgtgtttgtggacttcaccagggaggagtggaagctgct
ggacactgctcagcagatcctgtacagaaatgtgatgctggagaactataagaacctggttt
ccttgggttatcagcttactaagccagatgtgatcctccggttggagaagggagaagagccc
tggctggtg

1. A method of stably activating a gene or gene product within the imprinted 15q11-13 locus in a subject having Prader Willi Syndrome (PWS) or Prader-Willi-like disorder, the method comprising non-virally administering to the subject a DNA targeting system that targets a target region in the imprinted 15q11-13 locus, the DNA targeting system comprising:
a Cas protein or a fusion protein, wherein the fusion protein comprises two heterologous polypeptide domains, wherein the first polypeptide domain comprises a DNA-binding protein and wherein the second polypeptide domain has an activity selected from transcription activation activity, transcription repression activity, transcription release factor activity, histone modification activity, nuclease activity, nucleic acid association activity, methylase activity, demethylase activity, acetylation activity, and deacetylation activity,
wherein the Cas protein or fusion protein is targeted to the target region in the imprinted 15q11-13 locus.

2. The method of claim 1, wherein at least one component of the DNA targeting system is transiently expressed in a cell from the subject or transiently delivered to a cell from the subject.

3. The method of any one of claims 1-2, wherein expression of a gene within the imprinted 15q1-13 locus is maintained in a cell from the subject for at least 10, at least 15, at least 20, at least 25, at least 26, at least 30, at least 35, at least 40, at least 45, at least 48, at least 50, or at least 55 days post-administration.

4. The method of any one of claims 1-3, wherein the DNA-binding protein comprises a Cas protein, a zinc finger protein, or a transcription activator-like effector (TALE) protein.

5. The method of any one of claims 1-4, wherein the DNA-binding protein comprises a Cas protein and the DNA targeting system further comprises one or more guide RNAs (gRNA) that binds to the target region in the imprinted 15q11-13 locus.

6. The method of any one of claims 1-5, wherein the Cas protein comprises a Cas9 protein.

7. The method of any one of claims 1-6, wherein the second polypeptide domain comprises VP64, VP16; GAL4; p65 subdomain (NFkB); KMT2 family transcriptional activators: hSET1A, hSET1B, MLL1 to 5, ASH1, and homologs (Trx, Trr, Ash1); KMT3 family: SYMD2, NSD1; KMT4 family: DOT1L and homologs; KDM1: LSD1/BHC110 and homologs (SpLsd1/Swml/Saf110, Su(var)3-3); KDM3 family: JHDM2a/b; KDM4 family: JMJD2A/JHDM3A, JMJD2B, JMJD2C/GASC1, JMJD2D, and homologs (Rph1); KDM6 family: UTX, JMJD3, VP64-p65-Rta (VPR); synergistic action mediator (SAM); p300; VP160; VP64-dCas9-BFP-VP64; KAT2 family: hGCN5, PCAF, and homologs (dGCN5/PCAF, Gcn5; KAT3 family: CBP, p300 and homologs (dCBP/NEJ); KAT4: TAF1 and homologs (dTAF1); KAT5: TIP60/PLIP, and homologs; KAT6: MOZ/MYST3, MORF/MYST4, and homologs (Mst2, Sas3, CG1894); KAT7: HBO1/MYST2, and homologs (CHM, Mst2); KAT8: HMOF/MYST1, and homologs (dMOF, CG1894, Sas2, Mst2); KAT13 family: SRC1, ACTR, P160, CLOCK, and homologs; AID/Apobed deaminase family: AID; TET dioxygenase family: TET1; DEMETER glycosylase family: DME, DML1, DML2, or ROS1.

8. The method of any one of claims 1-6, wherein the second polypeptide domain comprises KRAB, Mad mSIN3 interaction domain (SID); the ERF repressor domain (ERD); KMT1 family: SUV39H1, SUV39H2, G9A, ESET/SETBD1, and homologs (Cir4, Su(var)3-9); KMT5 family: Pr-SET7/8, SUV4-20H1, and homologs (PR-set7, Suv4-20, and Set9); KMT6: EZH2, KMT8: RIZ1, KDM4 family: JMJD2A/JHDM3A, JMJD2B, JMJ2D2C/GASC1, JMJD2D, and homologs (Rph1); KDM5 family JARID1A/RBP2, JARID1B/PLU-1, JARID1C/SMCX, JARID1D/SMCY, and homologs (Lid, Jhn2, Jmj2); HDAC1, HDAC2, HDAC3, HDAC8, and its homologs (Rpd3, Hos1, Cir6); HDAC4, HDAC5, HDAC7, HDAC9, and its homologs (Hda1, Cir3); SIRT1, SIRT2, and its homologs (Sir2, Hst1, Hst2, Hst3, and Hst4); HDAC11, DNMT1, DNMT3a/3b, MET1, DRM3, and homologs, ZMET2, CMT1, CMT2, Laminin A, Laminin B, or CTCF.

9. The method of any one of claims 1-8, wherein the second polypeptide domain comprises Tet1c or Tet1v4.

10. The method of any one of claims 1-9, wherein the second polypeptide domain comprises the amino acid sequence of SEQ ID NO: 1139 or SEQ ID NO: 1166, or is encoded by a polynucleotide comprising the sequence of SEQ ID NO: 1138 or SEQ ID NO: 1167.

11. The method of any one of claims 1-8, wherein the fusion protein comprises VP64-dCas9-VP64, dCas9-KRAB, Tet1c-dCas9, or Tet1v4-dCas9.

12. The method of any one of claims 1-11, wherein the fusion protein comprises the amino acid sequence of SEQ ID NO: 1168 or SEQ ID NO: 1169, or is encoded by a polynucleotide comprising the sequence of SEQ ID NO: 1169 or SEQ ID NO: 1171.

13. The method of any one of claims 1-12, wherein the target region in the imprinted 15q11-13 PWS-associated locus is on the maternal copy.

14. The method of any one of claims 1-12, wherein the target region in the imprinted 15q11-13 PWS-associated locus is on the paternal copy.

15. The method of any one of claims 1-14, wherein the expression of a gene or gene product within the imprinted 15q11-13 locus is increased.

16. The method of any one of claims 1-15, wherein the gene within the imprinted 15q11-13 locus comprises SNRPN, MAGEL2, MKRN3, NDN, C15ORF2, SNURF-SNRPN, SNHG14, SNORD107, SNORD64, SNORD109A, SNORD116, SNORD116@, SPA1, SPA2, 116HG, SNORD116-1 to 30, Sno-Inc RNA 1 to 5, IPW, SNORD115, SNORD115@M, 115HG, SNORD115-1 to 48, SNORD109B, SNG14, or a snoRNA in the SNORD116 cluster, or a combination thereof.

17. The method of claim 16, wherein the gene within the imprinted 15q11-13 locus comprises SNRPN, SNORD116, MAGEL2, SNORD115, SPA1, and/or SPA2.

18. The method of claim 17, wherein the expression of MAGEL2 or its products is increased.

19. The method of claim 17, wherein the expression of SNORD116 or its products is increased.

20. The method of claim 17, wherein the expression of the SNRPN gene or its products is increased.

21. The method of claim 20, wherein expression of the SNRPN gene is maintained in a cell from the subject for at least 10, at least 15, at least 20, at least 25, at least 26, at least 30, at least 35, at least 40, at least 45, at least 48, at least 50, or at least 55 days post-administration.

22. The method of any one of claims 1-21, wherein the gRNA is encoded by a polynucleotide comprising a sequence selected from SEQ ID NOs: 1148-1156 or binds to a polynucleotide comprising a sequence selected from SEQ ID NOs: 1148-1156 or comprises a sequence selected from SEQ ID NOs: 1157-1165.

23. The method of any one of claims 5-22, wherein the DNA targeting system comprises two or more gRNAs.

24. The method of any one of claims 1-23, wherein the subject is administered a vector comprising a polynucleotide encoding the DNA targeting system.

25. The method of claim 24, wherein the vector is a plasmid or a synthetic vector.

26. The method of claim 24, wherein the vector comprises RNA.

27. The method of claim 24, wherein the vector comprises ribonucleoprotein (RNP).

28. The method of any one of claims 24-27, wherein the vector is a vector within a nanoparticle.

29. The method of claim 28, wherein the nanoparticle is a lipid nanoparticle or a polymeric nanoparticle.

30. A DNA targeting system that targets the imprinted 15q11-13 locus, the DNA targeting system comprising:
(a) a Cas9 fusion protein, wherein the fusion protein comprises two heterologous polypeptide domains, wherein the first polypeptide domain comprises a Cas protein and the second polypeptide domain comprises Tet1, Tet1c, or Tet1v4; and
(b) one or more guide RNAs (gRNA) that bind to a target region in the imprinted 15q11-13 locus.

31. The DNA targeting system of claim 30, for use in stably activating expression of a gene or gene product within the imprinted 15q11-13 locus in a subject having Prader Willi Syndrome (PWS) or Prader-Willi-like disorder.

32. An isolated polynucleotide sequence encoding the DNA targeting system of claim 30 or 31.

33. A vector comprising the isolated polynucleotide sequence of claim 32.

34. A nanoparticle comprising the DNA targeting system of claim 30 or 31, or the isolated polynucleotide sequence of claim 32, or the vector of claim 33, or a combination thereof.

35. The nanoparticle of claim 34, wherein the nanoparticle is a lipid nanoparticle or a polymeric nanoparticle.

36. A pharmaceutical composition comprising the DNA targeting system of claim 30 or 31, or the isolated polynucleotide sequence of claim 32, or the vector of claim 33, or the nanoparticle of claim 34 or 35, or a combination thereof.

The application's sequence listing, which the Patent Office published only in electronic form, follows.

SEQUENCE LISTING (1177 sequences)

SEQ ID NO: 1 - DNA, 20 bp, synthetic construct
  misc_feature 1..20: note = Synthetic polynucleotide
  source 1..20: mol_type = other DNA
ctaagcagtggactaaggat

SEQ ID NO: 2 - DNA, 20 bp, synthetic construct
  misc_feature 1..20: note = Synthetic polynucleotide
  source 1..20: mol_type = other DNA
ctactttagattctattgta

SEQ ID NO: 3 - DNA, 20 bp, synthetic construct
  misc_feature 1..20: note = Synthetic polynucleotide
  source 1..20: mol_type = other DNA
gcagctcagaaagtgatgca

SEQ ID NO: 4 - DNA, 20 bp, synthetic construct
  misc_feature 1..20: note = Synthetic polynucleotide
  source 1..20: mol_type = other DNA
gccaggttactgattcatag

SEQ ID NO: 5 - DNA, 20 bp, synthetic construct
  misc_feature 1..20: note = Synthetic polynucleotide
  source 1..20: mol_type = other DNA
gcgcactgcagcgcagacca

SEQ ID NO: 6 - DNA, 20 bp, synthetic construct
  misc_feature 1..20: note = Synthetic polynucleotide
  source 1..20: mol_type = other DNA
ggaaccagtcagaacaggtg

SEQ ID NO: 7 - DNA, 20 bp, synthetic construct
  misc_feature 1..20: note = Synthetic polynucleotide
  source 1..20: mol_type = other DNA
ggtcggcttcaggagggaag

SEQ ID NO: 8 - DNA, 20 bp, synthetic construct
  misc_feature 1..20: note = Synthetic polynucleotide
  source 1..20: mol_type = other DNA
gtggataggtgcgttcaagg

SEQ ID NO: 9 - DNA, 20 bp, synthetic construct
  misc_feature 1..20: note = Synthetic polynucleotide
  source 1..20: mol_type = other DNA
gtttcaggcctggactgggt

SEQ ID NO: 10 - DNA, 20 bp, synthetic construct
  misc_feature 1..20: note = Synthetic polynucleotide
  source 1..20: mol_type = other DNA
acagttcagggcatgagata

SEQ ID NO: 11 - DNA, 20 bp, synthetic construct
  misc_feature 1..20: note = Synthetic polynucleotide
  source 1..20: mol_type = other DNA
cagttcagggcatgagataa

SEQ ID NO: 12 - DNA, 20 bp, synthetic construct
  misc_feature 1..20: note = Synthetic polynucleotide
  source 1..20: mol_type = other DNA
gggcatgagataagggcagt

SEQ ID NO: 13-22 - skipped (10 entries)

SEQ ID NO: 23 - DNA, 4107 bp, Streptococcus pyogenes
  source 1..4107: mol_type = genomic DNA
atggataaaaagtacagcatcgggctggacatcggtacaaactcagtggggtgggccgtgattacggacgagtacaaggtaccctccaaaaaatttaaagtgctgggtaacacggacagacactctataaagaaaaatcttattggagccttgctgttcgactcaggcgagacagccgaagccacaaggttgaagcggaccgccaggaggcggtataccaggagaaagaaccgcatatgctacctgcaagaaatcttcagtaacgagatggcaaaggttgacgatagctttttccatcgcctggaagaatcctttcttgttgaggaagacaagaagcacgaacggcaccccatctttggcaatattgtcgacgaagtggcatatcacgaaaagtacccgactatctaccacctcaggaagaagctggtggactctaccgataaggcggacctcagacttatttatttggcactcgcccacatgattaaatttagaggacatttcttgatcgagggcgacctgaacccggacaacagtgacgtcgataagctgttcatccaacttgtgcagacctacaatcaactgttcgaagaaaaccctataaatgcttcaggagtcgacgctaaagcaatcctgtccgcgcgcctctcaaaatctagaagacttgagaatctgattgctcagttgcccggggaaaagaaaaatggattgtttggcaacctgatcgccctcagtctcggactgaccccaaatttcaaaagtaacttcgacctggccgaagacgctaagctccagctgtccaaggacacatacgatgacgacctcgacaatctgctggcccagattggggatcagtacgccgatctctttttggcagcaaagaacctgtccgacgccatcctgttgagcgatatcttgagagtgaacaccgaaattactaaagcaccccttagcgcatctatgatcaagcggtacgacgagcatcatcaggatctgaccctgctgaaggctcttgtgaggcaacagctccccgaaaaatacaaggaaatcttctttgaccagagcaaaaacggctacgctggctatatagatggtggggccagtcaggaggaattctataaattcatcaagcccattctcgagaaaatggacggcacagaggagttgctggtcaaacttaacagggaggacctgctgcggaagcagcggacctttgacaacgggtctatcccccaccagattcatctgggcgaactgcacgcaatcctgaggaggcaggaggatttttatccttttcttaaagataaccgcgagaaaatagaaaagattcttacattcaggatcccgtactacgtgggacctctcgcccggggcaattcacggtttgcctggatgacaaggaagtcagaggagactattacaccttggaacttcgaagaagtggtggacaagggtgcatctgcccagtctttcatcgagcggatgacaaattttgacaagaacctccctaatgagaaggtgctgcccaaacattctctgctctacgagtactttaccgtctacaatgaactgactaaagtcaagtacgtcaccgagggaatgaggaagccggcattccttagtggagaacagaagaaggcgattgtagacctgttgttcaagaccaacaggaaggtgactgtgaagcaacttaaagaagactactttaagaagatcgaatgttttgacagtgtggaaatttcaggggttgaagaccgcttcaatgcgtcattggggacttaccatgatcttctcaagatcataaaggacaaagacttcctggacaacgaagaaaatgaggatattctcgaagacatcgtcctcaccctgaccctgttcgaagacagggaaatgatagaagagcgcttgaaaacctatgcccacctcttcgacgataaagttatgaagcagctgaagcgcaggagatacacaggatggggaagattgtcaaggaagctgatcaatggaattagggataaacagagtggcaagaccatactggatttcctcaaatctgatggcttcgccaataggaacttcatgcaactgattcacgatgactctcttaccttcaaggaggacattcaaaaggctcaggtgagcgggcagggagactcccttcatgaacacatcgcgaatttggcaggttcccccgctattaaaaagggcatccttcaaactgtcaaggtggtggatgaattggtcaaggtaatgggcagacataagccagaaaatattgtgatcgagatggcccgcgaaaaccagaccacacagaagggccagaaaaatagtagagagcggatgaagaggatcgaggagggcatcaaagagctgggatctcagattctcaaagaacaccccgtagaaaacacacagctgcagaacgaaaaattgtacttgtactatctgcagaacggcagagacatgtacgtcgaccaagaacttgatattaatagactgtccgactatgacgtagaccatatcgtgccccagtccttcctgaaggacgactccattgataacaaagtcttgacaagaagcgacaagaacaggggtaaaagtgataatgtgcctagcgaggaggtggtgaaaaaaatgaagaactactggcgacagctgcttaatgcaaagctcattacacaacggaagttcgataatctgacgaaagcagagagaggtggcttgtctgagttggacaaggcagggtttattaagcggcagctggtggaaactaggcagatcacaaagcacgtggcgcagattttggacagccggatgaacacaaaatacgacgaaaatgataaactgatacgagaggtcaaagttatcacgctgaaaagcaagctggtgtccgattttcggaaagacttccagttctacaaagttcgcgagattaataactaccatcatgctcacgatgcgtacctgaacgctgttgtcgggaccgccttgataaagaagtacccaaagctggaatccgagttcgtatacggggattacaaagtgtacgatgtgaggaaaatgatagccaagtccgagcaggagattggaaaggccacagctaagtacttcttttattctaacatcatgaatttttttaagacggaaattaccctggccaacggagagatcagaaagcggccccttatagagacaaatggtgaaacaggtgaaatcgtctgggataagggcagggatttcgctactgtgaggaaggtgctgagtatgccacaggtaaatatcgtgaaaaaaaccgaagtacagaccggaggattttccaaggaaagcattttgcctaaaagaaactcagacaagctcatcgcccgcaagaaagattgggaccctaagaaatacgggggatttgactcacccaccgtagcctattctgtgctggtggtagctaaggtggaaaaaggaaagtctaagaagctgaagtccgtgaaggaactcttgggaatcactatcatggaaagatcatcctttgaaaagaaccctatcgatttcctggaggctaagggttacaaggaggtcaagaaagacctcatcattaaactgccaaaatactctctcttcgagctggaaaatggcaggaagagaatgttggccagcgccggagagctgcaaaagggaaacgagcttgctctgccctccaaatatgttaattttctctatctcgcttcccactatgaaaagctgaaagggtctcccgaagataacgagcagaagcagctgttcgtcgaacagcacaagcactatctggatgaaataatcgaacaaataagcgagttcagcaaaagggttatcctggcggatgctaatttggacaaagtactgtctgcttataacaagcaccgggataagcctattagggaacaagccgagaatataattcacctctttacactcacgaatctcggagcccccgccgccttcaaatactttgatacgactatcgaccggaaacggtataccagtaccaaagaggtcctcgatgccaccctcatccaccagtcaattactggcctgtacgaaacacggatcgacctctctcaactgggcggcgactag

SEQ ID NO: 24 - protein, 1368 aa, Streptococcus pyogenes [sequence omitted]

SEQ ID NO: 25 - DNA, 3158 bp, Staphylococcus aureus
  source 1..3158: mol_type = genomic DNA
atgaaaaggaactacattctggggctggacatcgggattacaagcgtggggtatgggattattgactatgaaacaagggacgtgatcgacgcaggcgtcagactgttcaaggaggccaacgtggaaaacaatgagggacggagaagcaagaggggagccaggcgcctgaaacgacggagaaggcacagaatccagagggtgaagaaactgctgttcgattacaacctgctgaccgaccattctgagctgagtggaattaatccttatgaagccagggtgaaaggcctgagtcagaagctgtcagaggaagagttttccgcagctctgctgcacctggctaagcgccgaggagtgcataacgtcaatgaggtggaagaggacaccggcaacgagctgtctacaaaggaacagatctcacgcaatagcaaagctctggaagagaagtatgtcgcagagctgcagctggaacggctgaagaaagatggcgaggtgagagggtcaattaataggttcaagacaagcgactacgtcaaagaagccaagcagctgctgaaagtgcagaaggcttaccaccagctggatcagagcttcatcgatacttatatcgacctgctggagactcggagaacctactatgagggaccaggagaagggagccccttcggatggaaagacatcaaggaatggtacgagatgctgatgggacattgcacctattttccagaagagctgagaagcgtcaagtacgcttataacgcagatctgtacaacgccctgaatgacctgaacaacctggtcatcaccagggatgaaaacgagaaactggaatactatgagaagttccagatcatcgaaaacgtgtttaagcagaagaaaaagcctacactgaaacagattgctaaggagatcctggtcaacgaagaggacatcaagggctaccgggtgacaagcactggaaaaccagagttcaccaatctgaaagtgtatcacgatattaaggacatcacagcacggaaagaaatcattgagaacgccgaactgctggatcagattgctaagatcctgactatctaccagagctccgaggacatccaggaagagctgactaacctgaacagcgagctgacccaggaagagatcgaacagattagtaatctgaaggggtacaccggaacacacaacctgtccctgaaagctatcaatctgattctggatgagctgtggcatacaaacgacaatcagattgcaatctttaaccggctgaagctggtcccaaaaaaggtggacctgagtcagcagaaagagatcccaaccacactggtggacgatttcattctgtcacccgtggtcaagcggagcttcatccagagcatcaaagtgatcaacgccatcatcaagaagtacggcctgcccaatgatatcattatcgagctggctagggagaagaacagcaaggacgcacagaagatgatcaatgagatgcagaaacgaaaccggcagaccaatgaacgcattgaagagattatccgaactaccgggaaagagaacgcaaagtacctgattgaaaaaatcaagctgcacgatatgcaggagggaaagtgtctgtattctctggaggcctccccctggaggacctgctgaacaatccattcaactacgaggtcgatcatattatccccagaagcgtgtccttcgacaattcctttaacaacaaggtgctggtcaagcaggaagagaactctaaaaagggcaataggactcctttccagtacctgtctagttcagattccaagatctcttacgaaacctttaaaaagcacattctgaatctggccaaaggaaagggccgcatcagcaagaccaaaaaggagtacctgctggaagagcgggacatcaacagattctccgtccagaaggattttattaaccggaatctggtggacacaagatacgctactcgcggcctgatgaatctgctgcgatcctatttccgggtgaacaatctggatgtgaaagtcaagtccatcaacggcgggttcacatcttttctgaggcgcaaatggaagtttaaaaaggagcgcaacaaagggtacaagcaccatgccgaagatgctctgattatcgcaaatgccgacttcatctttaaggagtggaaaaagctggacaaagccaagaaagtgatggagaaccagatgttcgaagagaagcaggccgaatctatgcccgaaatcgagacagaacaggagtacaaggagattttcatcactcctcaccagatcaagcatatcaaggatttcaaggactacaagtactctcaccgggtggataaaaagcccaacagagagctgatcaatgacaccctgtatagtacaagaaaagacgataaggggaataccctgattgtgaacaatctgaacggactgtacgacaaagataatgacaagctgaaaaagctgatcaacaaaagtcccgagaagctgctgatgtaccaccatgatcctcagacatatcagaaactgaagctgattatggagcagtacggcgacgagaagaacccactgtataagtactatgaagagactgggaactacctgaccaagtatagcaaaaaggataatggccccgtgatcaagaagatcaagtactatgggaacaagctgaatgcccatctggacatcacagacgattaccctaacagtcgcaacaaggtggtcaagctgtcactgaagccatacagattcgatgtctatctggacaacggcgtgtataaatttgtgactgtcaagaatctggatgtcatcaaaaaggagaactactatgaagtgaatagcaagtgctacgaagaggctaaaaagctgaaaaagattagcaaccaggcagagttcatcgcctccttttacaacaacgacctgattaagatcaatggcgaactgtatagggtcatcggggtgaacaatgatctgctgaaccgcattgaagtgaatatgattgacatcacttaccgagagtatctggaaaacatgaatgataagcgcccccctcgaattatcaaaacaattgcctctaagactcagagtatcaaaaagtactcaaccgacattctgggaaacctgtatgaggtgaagagcaaaaagcaccctcagattatcaaaaagggc

SEQ ID NO: 26 - DNA, 3159 bp, Staphylococcus aureus
  source 1..3159: mol_type = genomic DNA
atgaagcggaactacatcctgggcctggacatcggcatcaccagcgtgggctacggcatcatcgactacgagacacgggacgtgatcgatgccggcgtgcggctgttcaaagaggccaacgtggaaaacaacgagggcaggcggagcaagagaggcgccagaaggctgaagcggcggaggcggcatagaatccagagagtgaagaagctgctgttcgactacaacctgctgaccgaccacagcgagctgagcggcatcaacccctacgaggccagagtgaagggcctgagccagaagctgagcgaggaagagttctctgccgccctgctgcacctggccaagagaagaggcgtgcacaacgtgaacgaggtggaagaggacaccggcaacgagctgtccaccaaagagcagatcagccggaacagcaaggccctggaagagaaatacgtggccgaactgcagctggaacggctgaagaaagacggcgaagtgcggggcagcatcaacagattcaagaccagcgactacgtgaaagaagccaaacagctgctgaaggtgcagaaggcctaccaccagctggaccagagcttcatcgacacctacatcgacctgctggaaacccggcggacctactatgagggacctggcgagggcagccccttcggctggaaggacatcaaagaatggtacgagatgctgatgggccactgcacctacttccccgaggaactgcggagcgtgaagtacgcctacaacgccgacctgtacaacgccctgaacgacctgaacaatctcgtgatcaccagggacgagaacgagaagctggaatattacgagaagttccagatcatcgagaacgtgttcaagcagaagaagaagcccaccctgaagcagatcgccaaagaaatcctcgtgaacgaagaggatattaagggctacagagtgaccagcaccggcaagcccgagttcaccaacctgaaggtgtaccacgacatcaaggacattaccgcccggaaagagattattgagaacgccgagctgctggatcagattgccaagatcctgaccatctaccagagcagcgaggacatccaggaagaactgaccaatctgaactccgagctgacccaggaagagatcgagcagatctctaatctgaagggctataccggcacccacaacctgagcctgaaggccatcaacctgatcctggacgagctgtggcacaccaacgacaaccagatcgctatcttcaaccggctgaagctggtgcccaagaaggtggacctgtcccagcagaaagagatccccaccaccctggtggacgacttcatcctgagccccgtcgtgaagagaagcttcatccagagcatcaaagtgatcaacgccatcatcaagaagtacggcctgcccaacgacatcattatcgagctggcccgcgagaagaactccaaggacgcccagaaaatgatcaacgagatgcagaagcggaaccggcagaccaacgagcggatcgaggaaatcatccggaccaccggcaaagagaacgccaagtacctgatcgagaagatcaagctgcacgacatgcaggaaggcaagtgcctgtacagcctggaagccatccctctggaagatctgctgaacaaccccttcaactatgaggtggaccacatcatccccagaagcgtgtccttcgacaacagcttcaacaacaaggtgctcgtgaagcaggaagaaaacagcaagaagggcaaccggaccccattccagtacctgagcagcagcgacagcaagatcagctacgaaaccttcaagaagcacatcctgaatctggccaagggcaagggcagaatcagcaagaccaagaaagagtatctgctggaagaacgggacatcaacaggttctccgtgcagaaagacttcatcaaccggaacctggtggataccagatacgccaccagaggcctgatgaacctgctgcggagctacttcagagtgaacaacctggacgtgaaagtgaagtccatcaatggcggcttcaccagctttctgcggcggaagtggaagtttaagaaagagcggaacaaggggtacaagcaccacgccgaggacgccctgatcattgccaacgccgatttcatcttcaaagagtggaagaaactggacaaggccaaaaaagtgatggaaaaccagatgttcgaggaaaagcaggccgagagcatgcccgagatcgaaaccgagcaggagtacaaagagatcttcatcaccccccaccagatcaagcacattaaggacttcaaggactacaagtacagccaccgggtggacaagaagcctaatagagagctgattaacgacaccctgtactccacccggaaggacgacaagggcaacaccctgatcgtgaacaatctgaacggcctgtacgacaaggacaatgacaagctgaaaaagctgatcaacaagagccccgaaaagctgctgatgtaccaccacgacccccagacctaccagaaactgaagctgattatggaacagtacggcgacgagaagaatcccctgtacaagtactacgaggaaaccgggaactacctgaccaagtactccaaaaaggacaacggccccgtgatcaagaagattaagtattacggcaacaaactgaacgcccatctggacatcaccgacgactaccccaacagcagaaacaaggtcgtgaagctgtccctgaagccctacagattcgacgtgtacctggacaatggcgtgtacaagttcgtgaccgtgaagaatctggatgtgatcaaaaaagaaaactactacgaagtgaatagcaagtgctatgaggaagctaagaagctgaagaagatcagcaaccaggccgagtttatcgcctccttctacaacaacgatctgatcaagatcaacggcgagctgtatagagtgatcggcgtgaacaacgacctgctgaaccggatcgaagtgaacatgatcgacatcacctaccgcgagtacctggaaaacatgaacgacaagaggccccccaggatcattaagacaatcgcctccaagacccagagcattaagaagtacagcacagacattctgggcaacctgtatgaagtgaaatctaagaagcaccctcagatcatcaaaaagggc

SEQ ID NO: 27 - DNA, 3159 bp, Staphylococcus aureus
  source 1..3159: mol_type = genomic DNA
atgaagcgcaactacatcctcggactggacatcggcattacctccgtgggatacggcatcatcgattacgaaactagggatgtgatcgacgctggagtcaggctgttcaaagaggcgaacgtggagaacaacgaggggcggcgctcaaagaggggggcccgccggctgaagcgccgccgcagacatagaatccagcgcgtgaagaagctgctgttcgactacaaccttctgaccgaccactccgaactttccggcatcaacccatatgaggctagagtgaagggattgtcccaaaagctgtccgaggaagagttctccgccgcgttgctccacctcgccaagcgcaggggagtgcacaatgtgaacgaagtggaagaagataccggaaacgagctgtccaccaaggagcagatcagccggaactccaaggccctggaagagaaatacgtggcggaactgcaactggagcggctgaagaaagacggagaagtgcgcggctcgatcaaccgcttcaagacctcggactacgtgaaggaggccaagcagctcctgaaagtgcaaaaggcctatcaccaacttgaccagtcctttatcgatacctacatcgatctgctcgagactcggcggacttactacgagggtccaggggagggctccccatttggttggaaggatattaaggagtggtacgaaatgctgatgggacactgcacatacttccctgaggagctgcggagcgtgaaatacgcatacaacgcagacctgtacaacgcgctgaacgacctgaacaatctcgtgatcacccgggacgagaacgaaaagctcgagtattacgaaaagttccagattattgagaacgtgttcaaacagaagaagaagccgacactgaagcagattgccaaggaaatcctcgtgaacgaagaggacatcaagggctatcgagtgacctcaacgggaaagccggagttcaccaatctgaaggtctaccacgacatcaaagacattaccgcccggaaggagatcattgagaacgcggagctgttggaccagattgcgaagattctgaccatctaccaatcctccgaggatattcaggaagaactcaccaacctcaacagcgaactgacccaggaggagatagagcaaatctccaacctgaagggctacaccggaactcataacctgagcctgaaggccatcaacttgatcctggacgagctgtggcacaccaacgataaccagatcgctattttcaatcggctgaagctggtccccaagaaagtggacctctcacaacaaaaggagatccctactacccttgtggacgatttcattctgtcccccgtggtcaagagaagcttcatacagtcaatcaaagtgatcaatgccattatcaagaaatacggtctgcccaacgacattatcattgagctcgcccgcgagaagaactcgaaggacgcccagaagatgattaacgaaatgcagaagaggaaccgacagactaacgaacggatcgaagaaatcatccggaccaccgggaaggaaaacgcgaagtacctgatcgaaaagatcaagctccatgacatgcaggaaggaaagtgtctgtactcgctggaggccattccgctggaggacttgctgaacaacccttttaactacgaagtggatcatatcattccgaggagcgtgtcattcgacaattccttcaacaacaaggtcctcgtgaagcaggaggaaaactcgaagaagggaaaccgcacgccgttccagtacctgagcagcagcgactccaagatttcctacgaaaccttcaagaagcacatcctcaacctggcaaaggggaagggtcgcatctccaagaccaagaaggaatatctgctggaagaaagagacatcaacagattctccgtgcaaaaggacttcatcaaccgcaacctcgtggatactagatacgctactcggggtctgatgaacctcctgagaagctactttagagtgaacaatctggacgtgaaggtcaagtcgattaacggaggtttcacctccttcctgcggcgcaagtggaagttcaagaaggaacggaacaagggctacaagcaccacgccgaggacgccctgatcattgccaacgccgacttcatcttcaaagaatggaagaaacttgacaaggctaagaaggtcatggaaaaccagatgttcgaagaaaagcaggccgagtctatgcctgaaatcgagactgaacaggagtacaaggaaatctttattacgccacaccagatcaaacacatcaaggatttcaaggattacaagtactcacatcgcgtggacaaaaagccgaacagggaactgatcaacgacaccctctactccacccggaaggatgacaaagggaataccctcatcgtcaacaaccttaacggcctgtacgacaaggacaacgataagctgaagaagctcattaacaagtcgcccgaaaagttgctgatgtaccaccacgaccctcagacttaccagaagctcaagctgatcatggagcagtatggggacgagaaaaacccgttgtacaagtactacgaagaaactgggaattatctgactaagtactccaagaaagataacggccccgtgattaagaagattaagtactacggcaacaagctgaacgcccatctggacatcaccgatgactaccctaattcccgcaacaaggtcgtcaagctgagcctcaagccctaccggtttgatgtgtaccttgacaatggagtgtacaagttcgtgactgtgaagaaccttgacgtgatcaagaaggagaactactacgaagtcaactccaagtgctacgaggaagcaaagaagttgaagaagatctcgaaccaggccgagttcattgcctccttctataacaacgacctgattaagatcaacggcgaactgtaccgcgtcattggcgtgaacaacgatctcctgaaccgcatcgaagtgaacatgatcgacatcacttaccgggaatacctggagaatatgaacgacaagcgcccgccccggatcattaagactatcgcctcaaagacccagtcgatcaagaagtacagcaccgacatcctgggcaacctgtacgaggtcaaatcgaagaagcacccccagatcatcaagaaggga

SEQ ID NO: 28 - DNA, 3255 bp, Staphylococcus aureus
  source 1..3255: mol_type = genomic DNA
atggccccaaagaagaagcggaaggtcggtatccacggagtcccagcagccaagcggaactacatcctgggcctggacatcggcatcaccagcgtgggctacggcatcatcgactacgagacacgggacgtgatcgatgccggcgtgcggctgttcaaagaggccaacgtggaaaacaacgagggcaggcggagcaagagaggcgccagaaggctgaagcggcggaggcggcatagaatccagagagtgaagaagctgctgttcgactacaacctgctgaccgaccacagcgagctgagcggcatcaacccctacgaggccagagtgaagggcctgagccagaagctgagcgaggaagagttctctgccgccctgctgcacctggccaagagaagaggcgtgcacaacgtgaacgaggtggaagaggacaccggcaacgagctgtccaccagagagcagatcagccggaacagcaaggccctggaagagaaatacgtggccgaactgcagctggaacggctgaagaaagacggcgaagtgcggggcagcatcaacagattcaagaccagcgactacgtgaaagaagccaaacagctgctgaaggtgcagaaggcctaccaccagctggaccagagcttcatcgacacctacatcgacctgctggaaacccggcggacctactatgagggacctggcgagggcagccccttcggctggaaggacatcaaagaatggtacgagatgctgatgggccactgcacctacttccccgaggaactgcggagcgtgaagtacgcctacaacgccgacctgtacaacgccctgaacgacctgaacaatctcgtgatcaccagggacgagaacgagaagctggaatattacgagaagttccagatcatcgagaacgtgttcaagcagaagaagaagcccaccctgaagcagatcgccaaagaaatcctcgtgaacgaagaggatattaagggctacagagtgaccagcaccggcaagcccgagttcaccaacctgaaggtgtaccacgacatcaaggacattaccgcccggaaagagattattgagaacgccgagctgctggatcagattgccaagatcctgaccatctaccagagcagcgaggacatccaggaagaactgaccaatctgaactccgagctgacccaggaagagatcgagcagatctctaatctgaagggctataccggcacccacaacctgagcctgaaggccatcaacctgatcctggacgagctgtggcacaccaacgacaaccagatcgctatcttcaaccggctgaagctggtgcccaagaaggtggacctgtcccagcagaaagagatccccaccaccctggtggacgacttcatcctgagccccgtcgtgaagagaagcttcatccagagcatcaaagtgatcaacgccatcatcaagaagtacggcctgcccaacgacatcattatcgagctggcccgcgagaagaactccaaggacgcccagaaaatgatcaacgagatgcagaagcggaaccggcagaccaacgagcggatcgaggaaatcatccggaccaccggcaaagagaacgccaagtacctgatcgagaagatcaagctgcacgacatgcaggaaggcaagtgcctgtacagcctggaagccatccctctggaagatctgctgaacaaccccttcaactatgaggtggaccacatcatccccagaagcgtgtccttcgacaacagcttcaacaacaaggtgctcgtgaagcaggaagaaaacagcaagaagggcaaccggaccccattccagtacctgagcagcagcgacagcaagatcagctacgaaaccttcaagaagcacatcctgaatctggccaagggcaagggcagaatcagcaagaccaagaaagagtatctgctggaagaacgggacatcaacaggttctccgtgcagaaagacttcatcaaccggaacctggtggataccagatacgccaccagaggcctgatgaacctgctgcggagctacttcagagtgaacaacctggacgtgaaagtgaagtccatcaatggcggcttcaccagctttctgcggcggaagtggaagtttaagaaagagcggaacaaggggtacaagcaccacgccgaggacgccctgatcattgccaacgccgatttcatcttcaaagagtggaagaaactggacaaggccaaaaaagtgatggaaaaccagatgttcgaggaaaggcaggccgagagcatgcccgagatcgaaaccgagcaggagtacaaagagatcttcatcaccccccaccagatcaagcacattaaggacttcaaggactacaagtacagccaccgggtggacaagaagcctaatagagagctgattaacgacaccctgtactccacccggaaggacgacaagggcaacaccctgatcgtgaacaatctgaacggcctgtacgacaaggacaatgacaagctgaaaaagctgatcaacaagagccccgaaaagctgctgatgtaccaccacgacccccagacctaccagaaactgaagctgattatggaacagtacggcgacgagaagaatcccctgtacaagtactacgaggaaaccgggaactacctgaccaagtactccaaaaaggacaacggccccgtgatcaagaagattaagtattacggcaacaaactgaacgcccatctggacatcaccgacgactaccccaacagcagaaacaaggtcgtgaagctgtccctgaagccctacagattcgacgtgtacctggacaatggcgtgtacaagttcgtgaccgtgaagaatctggatgtgatcaaaaaagaaaactactacgaagtgaatagcaagtgctatgaggaagctaagaagctgaagaagatcagcaaccaggccgagtttatcgcctccttctacaacaacgatctgatcaagatcaacggcgagctgtatagagtgatcggcgtgaacaacgacctgctgaaccggatcgaagtgaacatgatcgacatcacctaccgcgagtacctggaaaacatgaacgacaagaggccccccaggatcattaagacaatcgcctccaagacccagagcattaagaagtacagcacagacattctgggcaacctgtatgaagtgaaatctaagaagcaccctcagatcatcaaaaagggcaaaaggccggcggccacgaaaaaggccggccaggcaaaaaagaaaaag

SEQ ID NO: 29 - DNA, 3239 bp, Staphylococcus aureus
  source 1..3239: mol_type = genomic DNA
accggtgccaccatgtacccatacgatgttccagattacgcttcgccgaagaaaaagcgcaaggtcgaagcgtccatgaaaaggaactacattctggggctggacatcgggattacaagcgtggggtatgggattattgactatgaaacaagggacgtgatcgacgcaggcgtcagactgttcaaggaggccaacgtggaaaacaatgagggacggagaagcaagaggggagccaggcgcctgaaacgacggagaaggcacagaatccagagggtgaagaaactgctgttcgattacaacctgctgaccgaccattctgagctgagtggaattaatccttatgaagccagggtgaaaggcctgagtcagaagctgtcagaggaagagttttccgcagctctgctgcacctggctaagcgccgaggagtgcataacgtcaatgaggtggaagaggacaccggcaacgagctgtctacaaaggaacagatctcacgcaatagcaaagctctggaagagaagtatgtcgcagagctgcagctggaacggctgaagaaagatggcgaggtgagagggtcaattaataggttcaagacaagcgactacgtcaaagaagccaagcagctgctgaaagtgcagaaggcttaccaccagctggatcagagcttcatcgatacttatatcgacctgctggagactcggagaacctactatgagggaccaggagaagggagccccttcggatggaaagacatcaaggaatggtacgagatgctgatgggacattgcacctattttccagaagagctgagaagcgtcaagtacgcttataacgcagatcttacaacgccctgaatgacctgaacaacctggtcatcaccagggatgaaaacgagaaactggaatactatgagaagttccagatcatcgaaaacgtgtttaagcagaagaaaaagcctacactgaaacagattgctaaggagatcctggtcaacgaagaggacatcaagggctaccgggtgacaagcactggaaaaccagagttcaccaatctgaaagtgtatcacgatattaaggacatcacagcacggaaagaaatcattgagaacgccgaactgctggatcagattgctaagatcctgactatctaccagagctccgaggacatccaggaagagctgactaacctgaacagcgagctgacccaggaagagatcgaacagattagtaatctgaaggggtacaccggaacacacaacctgtccctgaaagctatcaatctgattctggatgagctgtggcatacaaacgacaatcagattgcaatctttaaccggctgaagctggtcccaaaaaaggtggacctgagtcagcagaaagagatcccaaccacactggtggacgatttcattctgtcacccgtggtcaagcggagcttcatccagagcatcaaagtgatcaacgccatcatcaagaagtacggcctgcccaatgatatcattatcgagctggctagggagaagaacagcaaggacgcacagaagatgatcaatgagatgcagaaacgaaaccggcagaccaatgaacgcattgaagagattatccgaactaccgggaaagagaacgcaaagtacctgattgaaaaaatcaagctgcacgatatgcaggagggaaagtgtctgtattctctggaggccatccccctggaggacctgctgaacaatccattcaactacgaggtcgatcatattatccccagaagcgtgtccttcgacaattcctttaacaacaaggtgctggtcaagcaggaagagaactctaaaaagggcaataggactcctttccagtacctgtctagttcagattccaagatctcttacgaaacctttaaaaagcacattctgaatctggccaaaggaaagggccgcatcagcaagaccaaaaaggagtacctgctggaagagcgggacatcaacagattctccgtccagaaggattttattaaccggaatctggtggacacaagatacgctactcgcggcctgatgaatctgctgcgatcctatttccgggtgaacaatctggatgtgaaagtcaagtccatcaacggcgggttcacatcttttctgaggcgcaaatggaagtttaaaaaggagcgcaacaaagggtacaagcaccatgccgaagatgctctgattatcgcaaatgccgacttcatctttaaggagtggaaaaagctggacaaagccaagaaagtgatggagaaccagatgttcgaagagaagcaggccgaatctatgcccgaaatcgagacagaacaggagtacaaggagattttcatcactcctcaccagatcaagcatatcaaggatttcaaggactacaagtactctcaccgggtggataaaaagcccaacagagagctgatcaatgacaccctgtatagtacaagaaaagacgataaggggaataccctgattgtgaacaatctgaacggactgtacgacaaagataatgacaagctgaaaaagctgatcaacaaaagtcccgagaagctgctgatgtaccaccatgatcctcagacatatcagaaactgaagctgattatggagcagtacggcgacgagaagaacccactgtataagtactatgaagagactgggaactacctgaccaagtatagcaaaaaggataatggccccgtgatcaagaagatcaagtactatgggaacaagctgaatgcccatctggacatcacagacgattaccctaacagtcgcaacaaggtggtcaagctgtcactgaagccatacagattcgatgtctatctggacaacggcgtgtataaatttgtgactgtcaagaatctggatgtcatcaaaaaggagaactactatgaagtgaatagcaagtgctacgaagaggctaaaaagctgaaaaagattagcaaccaggcagagttcatcgcctccttttacaacaacgacctgattaagatcaatggcgaactgtatagggtcatcggggtgaacaatgatctgctgaaccgcattgaagtgaatatgattgacatcacttaccgagagtatctggaaaacatgaatgataagcgcccccctcgaattatcaaaacaattgcctctaagactcagagtatcaaaaagtactcaaccgacattctgggaaacctgtatgaggtgaagagcaaaaagcaccctcagattatcaaaaagggctaagaa

SEQ ID NO: 30 - protein, 1053 aa, Staphylococcus aureus
MKRNYILGLDIGITSVGYGIIDYETRDVIDAGVRLFKEANVENNEGRRSKRGARRLKRRRRHRIQRVKKLLFDYNLLTDHSELSGINPYEARVKGLSQKLSEEEFSAALLHLAKRRGVHNVNEVEEDTGNELSTKEQISRNSKALEEKYVAELQLERLKKDGEVRGSINRFKTSDYVKEAKQLLKVQKAYHQLDQSFIDTYIDLLETRRTYYEGPGEGSPFGWKDIKEWYEMLMGHCTYFPEELRSVKYAYNADLYNALNDLNNLVITRDENEKLEYYEKFQIIENVFKQKKKPTLKQIAKEILVNEEDIKGYRVTSTGKPEFTNLKVYHDIKDITARKEIIENAELLDQIAKILTIYQSSEDIQEELTNLNSELTQEEIEQISNLKGYTGTHNLSLKAINLILDELWHTNDNQIAIFNRLKLVPKKVDLSQQKEIPTTLVDDFILSPVVKRSFIQSIKVINAIIKKYGLPNDIIIELAREKNSKDAQKMINEMQKRNRQTNERIEEIIRTTGKENAKYLIEKIKLHDMQEGKCLYSLEAIPLEDLLNNPFNYEVDHIIPRSVSFDNSFNNKVLVKQEENSKKGNRTPFQYLSSSDSKISYETFKKHILNLAKGKGRISKTKKEYLLEERDINRFSVQKDFINRNLVDTRYATRGLMNLLRSYFRVNNLDVKVKSINGGFTSFLRRKWKFKKERNKGYKHHAEDALIIANADFIFKEWKKLDKAKKVMENQMFEEKQAESMPEIETEQEYKEIFITPHQIKHIKDFKDYKYSHRVDKKPNRELINDTLYSTRKDDKGNTLIVNNLNGLYDKDNDKLKKLINKSPEKLLMYHHDPQTYQKLKLIMEQYGDEKNPLYKYYEETGNYLTKYSKKDNGPVIKKIKYYGNKLNAHLDITDDYPNSRNKVVKLSLKPYRFDVYLDNGVYKFVTVKNLDVIKKENYYEVNSKCYEEAKKLKKISNQAEFIASFYNNDLIKINGELYRVIGVNNDLLNRIEVNMIDITYREYLENMNDKRPPRIIKTIASKTQSIKKYSTDILGNLYEVKSKKHPQIIKKG

SEQ ID NO: 31 - DNA, 3159 bp, Staphylococcus aureus
  source 1..3159: mol_type = genomic DNA
atgaaaaggaactacattctggggctggccatcgggattacaagcgtggggtatgggattattgactatgaaacaagggacgtgatcgacgcaggcgtcagactgttcaaggaggccaacgtggaaaacaatgagggacggagaagcaagaggggagccaggcgcctgaaacgacggagaaggcacagaatccagagggtgaagaaactgctgttcgattacaacctgctgaccgaccattctgagctgagtggaattaatccttatgaagccagggtgaaaggcctgagtcagaagctgtcagaggaagagttttccgcagctctgctgcacctggctaagcgccgaggagtgcataacgtcaatgaggtggaagaggacaccggcaacgagctgtctacaaaggaacagatctcacgcaatagcaaagctctggaagagaagtatgtcgcagagctgcagctggaacggctgaagaaagatggcgaggtgagagggtcaattaataggttcaagacaagcgactacgtcaaagaagccaagcagctgctgaaagtgcagaaggcttaccaccagctggatcagagcttcatcgatacttatatcgacctgctggagactcggagaacctactatgagggaccaggagaagggagccccttcggatggaaagacatcaaggaatggtacgagatgctgatgggacattgcacctattttccagaagagctgagaagcgtcaagtacgcttataacgcagatctgtacaacgccctgaatgacctgaacaacctggtcatcaccagggatgaaaacgagaaactggaatactatgagaagttccagatcatcgaaaacgtgtttaagcagaagaaaaagcctacactgaaacagattgctaaggagatcctggtcaacgaagaggacatcaagggctaccgggtgacaagcactggaaaaccagagttcaccaatctgaaagtgtatcacgatattaaggacatcacagcacggaaagaaatcattgagaacgccgaactgctggatcagattgctaagatcctgactatctaccagagctccgaggacatccaggaagagctgactaacctgaacagcgagctgacccaggaagagatcgaacagattagtaatctgaaggggtacaccggaacacacaacctgtccctgaaagctatcaatctgattctggatgagctgtggcatacaaacgacaatcagattgcaatctttaaccggctgaagctggtcccaaaaaaggtggacctgagtcagcagaaagagatcccaaccacactggtggacgatttcattctgtcacccgtggtcaagcggagcttcatccagagcatcaaagtgatcaacgccatcatcaagaagtacggcctgcccaatgatatcattatcgagctggctagggagaagaacagcaaggacgcacagaagatgatcaatgagatgcagaaacgaaaccggcagaccaatgaacgcattgaagagattatccgaactaccgggaaagagaacgcaaagtacctgattgaaaaaatcaagctgcacgatatgcaggagggaaagtgtctgtattctctggaggccatccccctggaggacctgctgaacaatccattcaactacgaggtcgatcatattatccccagaagcgtgtccttcgacaattcctttaacaacaaggtgctggtcaagcaggaagagaactctaaaaagggcaataggactcctttccagtacctgtctagttcagattccaagatctcttacgaaacctttaaaaagcacattctgaatctggccaaaggaaagggccgcatcagcaagaccaaaaaggagtacctgctggaagagcgggacatcaacagattctccgtccagaaggattttattaaccggaatctggtggacacaagatacgctactcgcggcctgatgaatctgctgcgatcctatttccgggtgaacaatctggatgtgaaagtcaagtccatcaacggcgggttcacatcttttctgaggcgcaaatggaagtttaaaaaggagcgcaacaaagggtacaagcaccatgccgaagatgctctgattatcgcaaatgccgacttcatctttaaggagtggaaaaagctggacaaagccaagaaagtgatggagaaccagatgttcgaagagaagcaggccgaatctatgcccgaaatcgagacagaacaggagtacaaggagattttcatcactcctcaccagatcaagcatatcaaggatttcaaggactacaagtactctcaccgggtggataaaaagcccaacagagagctgatcaatgacaccctgtatagtacaagaaaagacgataaggggaataccctgattgtgaacaatctgaacggactgtacgacaaagataatgacaagctgaaaaagctgatcaacaaaagtcccgagaagctgctgatgtaccaccatgatcctcagacatatcagaaactgaagctgattatggagcagtacggcgacgagaagaacccactgtataagtactatgaagagactgggaactacctgaccaagtatagcaaaaaggataatggccccgtgatcaagaagatcaagtactatgggaacaagctgaatgcccatctggacatcacagacgattaccctaacagtcgcaacaaggtggtcaagctgtcactgaagccatacagattcgatgtctatctggacaacggcgtgtataaatttgtgactgtcaagaatctggatgtcatcaaaaaggagaactactatgaagtgaatagcaagtgctacgaagaggctaaaaagctgaaaaagattagcaaccaggcagagttcatcgcctccttttacaacaacgacctgattaagatcaatggcgaactgtatagggtcatcggggtgaacaatgatctgctgaaccgcattgaagtgaatatgattgacatcacttaccgagagtatctggaaaacatgaatgataagcgcccccctcgaattatcaaaacaattgcctctaagactcagagtatcaaaaagtactcaaccgacattctgggaaacctgtatgaggtgaagagcaaaaagcaccctcagattatcaaaaagggc

SEQ ID NO: 32 - DNA, 3159 bp, Staphylococcus aureus
  source 1..3159: mol_type = genomic DNA
atgaaaaggaactacattctggggctggacatcgggattacaagcgtggggtatgggattattgactatgaaacaagggacgtgatcgacgcaggcgtcagactgttcaaggaggccaacgtggaaaacaatgagggacggagaagcaagaggggagccaggcgcctgaaacgacggagaaggcacagaatccagagggtgaagaaactgctgttcgattacaacctgctgaccgaccattctgagctgagtggaattaatccttatgaagccagggtgaaaggcctgagtcagaagctgtcagaggaagagttttccgcagctctgctgcacctggctaagcgccgaggagtgcataacgtcaatgaggtggaagaggacaccggcaacgagctgtctacaaaggaacagatctcacgcaatagcaaagctctggaagagaagtatgtcgcagagctgcagctggaacggctgaagaaagatggcgaggtgagagggtcaattaataggttcaagacaagcgactacgtcaaagaagccaagcagctgctgaaagtgcagaaggcttaccaccagctggatcagagcttcatcgatacttatatcgacctgctggagactcggagaacctactatgagggaccaggagaagggagccccttcggatggaaagacatcaaggaatggtacgagatgctgatgggacattgcacctattttccagaagagctgagaagcgtcaagtacgcttataacgcagatctgtacaacgccctgaatgacctgaacaacctggtcatcaccagggatgaaaacgagaaactggaatactatgagaagttccagatcatcgaaaacgtgtttaagcagaagaaaaagcctacactgaaacagattgctaaggagatcctggtcaacgaagaggacatcaagggctaccgggtgacaagcactggaaaaccagagttcaccaatctgaaagtgtatcacgatattaaggacatcacagcacggaaagaaatcattgagaacgccgaactgctggatcagattgctaagatcctgactatctaccagagctccgaggacatccaggaagagctgactaacctgaacagcgagctgacccaggaagagatcgaacagattagtaatctgaaggggtacaccggaacacacaacctgtccctgaaagctatcaatctgattctggatgagctgtggcatacaaacgacaatcagattgcaatctttaaccggctgaagctggtcccaaaaaaggtggacctgagtcagcagaaagagatcccaaccacactggtggacgatttcattctgtcacccgtggtcaagcggagcttcatccagagcatcaaagtgatcaacgccatcatcaagaagtacggcctgcccaatgatatcattatcgagctggctagggagaagaacagcaaggacgcacagaagatgatcaatgagatgcagaaacgaaaccggcagaccaatgaacgcattgaagagattatccgaactaccgggaaagagaacgcaaagtacctgattgaaaaaatcaagctgcacgatatgcaggagggaaagtgtctgtattctctggaggccatccccctggaggacctgctgaacaatccattcaactacgaggtcgatcatattatccccagaagcgtgtccttcgacaattcctttaacaacaaggtgctggtcaagcaggaagaggcctctaaaaagggcaataggactcctttccagtacctgtctagttcagattccaagatctcttacgaaacctttaaaaagcacattctgaatctggccaaaggaaagggccgcatcagcaagaccaaaaaggagtacctgctggaagagcgggacatcaacagattctccgtccagaaggattttattaaccggaatctggtggacacaagatacgctactcgcggcctgatgaatctgctgcgatcctatttccgggtgaacaatctggatgtgaaagtcaagtccatcaacggcgggttcacatcttttctgaggcgcaaatggaagtttaaaaaggagcgcaacaaagggtacaagcaccatgccgaagatgctctgattatcgcaaatgccgacttcatctttaaggagtggaaaaagctggacaaagccaagaaagtgatggagaaccagatgttcgaagagaagcaggccgaatctatgcccgaaatcgagacagaacaggagtacaaggagattttcatcactcctcaccagatcaagcatatcaaggatttcaaggactacaagtactctcaccgggtggataaaaagcccaacagagagctgatcaatgacaccctgtatagtacaagaaaagacgataaggggaataccctgattgtgaacaatctgaacggactgtacgacaaagataatgacaagctgaaaaagctgatcaacaaaagtcccgagaagctgctgatgtaccaccatgatcctcagacatatcagaaactgaagctgattatggagcagtacggcgacgagaagaacccactgtataagtactatgaagagactgggaactacctgaccaagtatagcaaaaaggataatggccccgtgatcaagaagatcaagtactatgggaacaagctgaatgcccatctggacatcacagacgattaccctaacagtcgcaacaaggtggtcaagctgtcactgaagccatacagattcgatgtctatctggacaacggcgtgtataaatttgtgactgtcaagaatctggatgtcatcaaaaaggagaactactatgaagtgaatagcaagtgctacgaagaggctaaaaagctgaaaaagattagcaaccaggcagagttcatcgcctccttttacaacaacgacctgattaagatcaatggcgaactgtatagggtcatcggggtgaacaatgatctgctgaaccgcattgaagtgaatatgattgacatcacttaccgagagtatctggaaaacatgaatgataagcgcccccctcgaattatcaaaacaattgcctctaagactcagagtatcaaaaagtactcaaccgacattctgggaaacctgtatgaggtgaagagcaaaaagcaccctcagattatcaaaaagggc

SEQ ID NO: 33 - skipped

SEQ ID NO: 34 - DNA, 3255 bp, Staphylococcus aureus
  source 1..3255: mol_type = genomic DNA
atggccccaaagaagaagcggaaggtcggtatccacggagtcccagcagccaagcggaactacatcctgggcctggacatcggcatcaccagcgtgggctacggcatcatcgactacgagacacgggacgtgatcgatgccggcgtgcggctgttcaaagaggccaacgtggaaaacaacgagggcaggcggagcaagagaggcgccagaaggctgaagcggcggaggcggcatagaatccagagagtgaagaagctgctgttcgactacaacctgctgaccgaccacagcgagctgagcggcatcaacccctacgaggccagagtgaagggcctgagccagaagctgagcgaggaagagttctctgccgccctgctgcacctggccaagagaagaggcgtgcacaacgtgaacgaggtggaagaggacaccggcaacgagctgtccaccaaagagcagatcagccggaacagcaaggccctggaagagaaatacgtggccgaactgcagctggaacggctgaagaaagacggcgaagtgcggggcagcatcaacagattcaagaccagcgactacgtgaaagaagccaaacagctgctgaaggtgcagaaggcctaccaccagctggaccagagcttcatcgacacctacatcgacctgctggaaacccggcggacctactatgagggacctggcgagggcagccccttcggctggaaggacatcaaagaatggtacgagatgctgatgggccactgcacctacttccccgaggaactgcggagcgtgaagtacgcctacaacgccgacctgtacaacgccctgaacgacctgaacaatctcgtgatcaccagggacgagaacgagaagctggaatattacgagaagttccagatcatcgagaacgtgttcaagcagaagaagaagcccaccctgaagcagatcgccaaagaaatcctcgtgaacgaagaggatattaagggctacagagtgaccagcaccggcaagcccgagttcaccaacctgaaggtgtaccacgacatcaaggacattaccgcccggaaagagattattgagaacgccgagctgctggatcagattgccaagatcctgaccatctaccagagcagcgaggacatccaggaagaactgaccaatctgaactccgagctgacccaggaagagatcgagcagatctctaatctgaagggctataccggcacccacaacctgagcctgaaggccatcaacctgatcctggacgagctgtggcacaccaacgacaaccagatcgctatcttcaaccggctgaagctggtgcccaagaaggtggacctgtcccagcagaaagagatccccaccaccctggtggacgacttcatcctgagccccgtcgtgaagagaagcttcatccagagcatcaaagtgatcaacgccatcatcaagaagtacggcctgcccaacgacatcattatcgagctggcccgcgagaagaactccaaggacgcccagaaaatgatcaacgagatgcagaagcggaaccggcagaccaacgagcggatcgaggaaatcatccggaccaccggcaaagagaacgccaagtacctgatcgagaagatcaagctgcacgacatgcaggaaggcaagtgcctgtacagcctggaagccatccctctggaagatctgctgaacaaccccttcaactatgaggtggaccacatcatccccagaagcgtgtccttcgacaacagcttcaacaacaaggtgctcgtgaagcaggaagaaaacagcaagaagggcaaccggaccccattccagtacctgagcagcagcgacagcaagatcagctacgaaaccttcaagaagcacatcctgaatctggccaagggcaagggcagaatcagcaagaccaagaaagagtatctgctggaagaacgggacatcaacaggttctccgtgcagaaagacttcatcaaccggaacctggtggataccagatacgccaccagaggcctgatgaacctgctgcggagctacttcagagtgaacaacctggacgtgaaagtgaagtccatcaatggcggcttcaccagctttctgcggcggaagtggaagtttaagaaagagcggaacaaggggtacaagcaccacgccgaggacgccctgatcattgccaacgccgatttcatcttcaaagagtggaagaaactggacaaggccaaaaaagtgatggaaaaccagatgttcgaggaaaagcaggccgagagcatgcccgagatcgaaaccgagcaggagtacaaagagatcttcatcaccccccaccagatcaagcacattaaggacttcaaggactacaagtacagccaccgggtggacaagaagcctaatagagagctgattaacgacaccctgtactccacccggaaggacgacaagggcaacaccctgatcgtgaacaatctgaacggcctgtacgacaaggacaatgacaagctgaaaaagctgatcaacaagagccccgaaaagctgctgatgtaccaccacgacccccagacctaccagaaactgaagctgattatggaacagtacggcgacgagaagaatcccctgtacaagtactacgaggaaaccgggaactacctgaccaagtactccaaaaaggacaacggccccgtgatcaagaagattaagtattacggcaacaaactgaacgcccatctggacatcaccgacgactaccccaacagcagaaacaaggtcgtgaagctgtccctgaagccctacagattcgacgtgtacctggacaatggcgtgtacaagttcgtgaccgtgaagaatctggatgtgatcaaaaaagaaaactactacgaagtgaatagcaagtgctatgaggaagctaagaagctgaagaagatcagcaaccaggccgagtttatcgcctccttctacaacaacgatctgatcaagatcaacggcgagctgtatagagtgatcggcgtgaacaacgacctgctgaaccggatcgaagtgaacatgatcgacatcacctaccgcgagtacctggaaaacatgaacgacaagaggccccccaggatcattaagacaatcgcctccaagacccagagcattaagaagtacagcacagacattctgggcaacctgtatgaagtgaaatctaagaagcaccctcagatcatcaaaaagggcaaaaggccggcggccacgaaaaaggccggccaggcaaaaaagaaaaag

SEQ ID NO: 35 - DNA, 3156 bp, Staphylococcus aureus
  source 1..3156: mol_type = genomic DNA
aagcggaactacatcctgggcctggacatcggcatcaccagcgtgggctacggcatcatcgactacgagacacgggacgtgatcgatgccggcgtgcggctgttcaaagaggccaacgtggaaaacaacgagggcaggcggagcaagagaggcgccagaaggctgaagcggcggaggcggcatagaatccagagagtgaagaagctgctgttcgactacaacctgctgaccgaccacagcgagctgagcggcatcaacccctacgaggccagagtgaagggcctgagccagaagctgagcgaggaagagttctctgccgccctgctgcacctggccaagagaagaggcgtgcacaacgtgaacgaggtggaagaggacaccggcaacgagctgtccaccaaagagcagatcagccggaacagcaaggccctggaagagaaatacgtggccgaactgcagctggaacggctgaagaaagacggcgaagtgcggggcagcatcaacagattcaagaccagcgactacgtgaaagaagccaaacagctgctgaaggtgcagaaggcctaccaccagctggaccagagcttcatcgacacctacatcgacctgctggaaacccggcggacctactatgagggacctggcgagggcagccccttcggctggaaggacatcaaagaatggtacgagatgctgatgggccactgcacctacttccccgaggaactgcggagcgtgaagtacgcctacaacgccgacctgtacaacgccctgaacgacctgaacaatctcgtgatcaccagggacgagaacgagaagctggaatattacgagaagttccagatcatcgagaacgtgttcaagcagaagaagaagcccaccctgaagcagatcgccaaagaaatcctcgtgaacgaagaggatattaagggctacagagtgaccagcaccggcaagcccgagttcaccaacctgaaggtgtaccacgacatcaaggacattaccgcccggaaagagattattgagaacgccgagctgctggatcagattgccaagatcctgaccatctaccagagcagcgaggacatccaggaagaactgaccaatctgaactccgagctgacccaggaagagatcgagcagatctctaatctgaagggctataccggcacccacaacctgagcctgaaggccatcaacctgatcctggacgagctgtggcacaccaacgacaaccagatcgctatcttcaaccggctgaagctggtgcccaagaaggtggacctgtcccagcagaaagagatccccaccaccctggtggacgacttcatcctgagccccgtcgtgaagagaagcttcatccagagcatcaaagtgatcaacgccatcatcaagaagtacggcctgcccaacgacatcattatcgagctggcccgcgagaagaactccaaggacgcccagaaaatgatcaacgagatgcagaagcggaaccggcagaccaacgagcggatcgaggaaatcatccggaccaccggcaaagagaacgccaagtacctgatcgagaagatcaagctgcacgacatgcaggaaggcaagtgcctgtacagcctggaagccatccctctggaagatctgctgaacaaccccttcaactatgaggtggaccacatcatccccagaagcgtgtccttcgacaacagcttcaacaacaaggtgctcgtgaagcaggaagaaaacagcaagaagggcaaccggaccccattccagtacctgagcagcagcgacagcaagatcagctacgaaaccttcaagaagcacatcctgaatctggccaagggcaagggcagaatcagcaagaccaagaaagagtatctgctggaagaacgggacatcaacaggttctccgtgcagaaagacttcatcaaccggaacctggtggataccagatacgccaccagaggcctgatgaacctgctgcggagctacttcagagtgaacaacctggacgtgaaagtgaagtccatcaatggcggcttcaccagctttctgcggcggaagtggaagtttaagaaagagcggaacaaggggtacaagcaccacgccgaggacgccctgatcattgccaacgccgatttcatcttcaaagagtggaagaaactggacaaggccaaaaaagtgatggaaaaccagatgttcgaggaaaagcaggccgagagcatgcccgagatcgaaaccgagcaggagtacaaagagatcttcatcaccccccaccagatcaagcacattaaggacttcaaggactacaagtacagccaccgggtggacaagaagcctaatagagagctgattaacgacaccctgtactccacccggaaggacgacaagggcaacaccctgatcgtgaacaatctgaacggcctgtacgacaaggacaatgacaagctgaaaaagctgatcaacaagagccccgaaaagctgctgatgtaccaccacgacccccagacctaccagaaactgaagctgattatggaacagtacggcgacgagaagaatcccctgtacaagtactacgaggaaaccgggaactacctgaccaagtactccaaaaaggacaacggccccgtgatcaagaagattaagtattacggcaacaaactgaacgcccatctggacatcaccgacgactaccccaacagcagaaacaaggtcgtgaagctgtccctgaagccctacagattcgacgtgtacctggacaatggcgtgtacaagttcgtgaccgtgaagaatctggatgtgatcaaaaaagaaaactactacgaagtgaatagcaagtgctatgaggaagctaagaagctgaagaagatcagcaaccaggccgagtttatcgcctccttctacaacaacgatctgatcaagatcaacggcgagctgtatagagtgatcggcgtgaacaacgacctgctgaaccggatcgaagtgaacatgatcgacatcacctaccgcgagtacctggaaaacatgaacgacaagaggccccccaggatcattaagacaatcgcctccaagacccagagcattaagaagtacagcacagacattctgggcaacctgtatgaagtgaaatctaagaagcaccctcagatcatcaaaaagggc

SEQ ID NO: 36 - protein, 1052 aa, Staphylococcus aureus
KRNYILGLDIGITSVGYGIIDYETRDVIDAGVRLFKEANVENNEGRRSKRGARRLKRRRRHRIQRVKKLLFDYNLLTDHSELSGINPYEARVKGLSQKLSEEEFSAALLHLAKRRGVHNVNEVEEDTGNELSTKEQISRNSKALEEKYVAELQLERLKKDGEVRGSINRFKTSDYVKEAKQLLKVQKAYHQLDQSFIDTYIDLLETRRTYYEGPGEGSPFGWKDIKEWYEMLMGHCTYFPEELRSVKYAYNADLYNALNDLNNLVITRDENEKLEYYEKFQIIENVFKQKKKPTLKQIAKEILVNEEDIKGYRVTSTGKPEFTNLKVYHDIKDITARKEIIENAELLDQIAKILTIYQSSEDIQEELTNLNSELTQEEIEQISNLKGYTGTHNLSLKAINLILDELWHTNDNQIAIFNRLKLVPKKVDLSQQKEIPTTLVDDFILSPVVKRSFIQSIKVINAIIKKYGLPNDIIIELAREKNSKDAQKMINEMQKRNRQTNERIEEIIRTTGKENAKYLIEKIKLHDMQEGKCLYSLEAIPLEDLLNNPFNYEVDHIIPRSVSFDNSFNNKVLVKQEENSKKGNRTPFQYLSSSDSKISYETFKKHILNLAKGKGRISKTKKEYLLEERDINRFSVQKDFINRNLVDTRYATRGLMNLLRSYFRVNNLDVKVKSINGGFTSFLRRKWKFKKERNKGYKHHAEDALIIANADFIFKEWKKLDKAKKVMENQMFEEKQAESMPEIETEQEYKEIFITPHQIKHIKDFKDYKYSHRVDKKPNRELINDTLYSTRKDDKGNTLIVNNLNGLYDKDNDKLKKLINKSPEKLLMYHHDPQTYQKLKLIMEQYGDEKNPLYKYYEETGNYLTKYSKKDNGPVIKKIKYYGNKLNAHLDITDDYPNSRNKVVKLSLKPYRFDVYLDNGVYKFVTVKNLDVIKKENYYEVNSKCYEEAKKLKKISNQAEFIASFYNNDLIKINGELYRVIGVNNDLLNRIEVNMIDITYREYLENMNDKRPPRIIKTIASKTQSIKKYSTDILGNLYEVKSKKHPQIIKKG

SEQ ID NO: 37 - DNA, 7009 bp, synthetic construct
  misc_feature 1..7009: note = Synthetic polynucleotide
  source 1..7009: mol_type = other DNA
ctaaattgtaagcgttaatattttgttaaaattcgcgttaaatttttgttaaatcagctcattttttaaccaataggccgaaatcggcaaaatcccttataaatcaaaagaatagaccgagatagggttgagtgttgttccagtttggaacaagagtccactattaaagaacgtggactccaacgtcaaagggcgaaaaaccgtctatcagggcgatggcccactacgtgaaccatcaccctaatcaagttttttggggtcgaggtgccgtaaagcactaaatcggaaccctaaagggagcccccgatttagagcttgacggggaaagccggcgaacgtggcgagaaaggaagggaagaaagcgaaaggagcgggcgctagggcgctggcaagtgtagcggtcacgctgcgcgtaaccaccacacccgccgcgcttaatgcgccgctacagggcgcgtcccattcgccattcaggctgcgcaactgttgggaagggcgatcggtgcgggcctcttcgctattacgccagctggcgaaagggggatgtgctgcaaggcgattaagttgggtaacgccagggttttcccagtcacgacgttgtaaaacgacggccagtgagcgcgcgtaatacgactcactatagggcgaattgggtacctttaattctagtactatgcatgcgttgacattgattattgactagttattaatagtaatcaattacggggtcattagttcatagcccatatatggagttccgcgttacataacttacggtaaatggcccgcctggctgaccgcccaacgacccccgcccattgacgtcaataatgacgtatgttcccatagtaacgccaatagggactttccattgacgtcaatgggtggagtatttacggtaaactgcccacttggcagtacatcaagtgtatcatatgccaagtacgccccctattgacgtcaatgacggtaaatggcccgcctggcattatgcccagtacatgaccttatgggactttcctacttggcagtacatctacgtattagtcatcgctattaccatggtgatgcggttttggcagtacatcaatgggcgtggatagcggtttgactcacggggatttccaagtctccaccccattgacgtcaatgggagtttgttttggcaccaaaatcaacgggactttccaaaatgtcgtaacaactccgccccattgacgcaaatgggcggtaggcgtgtacggtgggaggtctatataagcagagctctctggctaactaccggtgccaccatgaaaaggaactacattctggggctggacatcgggattacaagcgtggggtatgggattattgactatgaaacaagggacgtgatcgacgcaggcgtcagactgttcaaggaggccaacgtggaaaacaatgagggacggagaagcaagaggggagccaggcgcctgaaacgacggagaaggcacagaatccagagggtgaagaaactgctgttcgattacaacctgctgaccgaccattctgagctgagtggaattaatccttatgaagccagggtgaaaggcctgagtcagaagctgtcagaggaagagttttccgcagctctgctgcacctggctaagcgccgaggagtgcataacgtcaatgaggtggaagaggacaccggcaacgagctgtctacaaaggaacagatctcacgcaatagcaaagctctggaagagaagtatgtcgcagagctgcagctggaacggctgaagaaagatggcgaggtgagagggtcaattaataggttcaagacaagcgactacgtcaaagaagccaagcagctgctgaaagtgcagaaggcttaccaccagctggatcagagcttcatcgatacttatatcgacctgctggagactcggagaacctactatgagggaccaggagaagggagccccttcggatggaaagacatcaaggaatggtacgagatgctgatgggacattgcacctattttccagaagagctgagaagcgtcaagtacgcttataacgcagatctgtacaacgccctgaatgacctgaacaacctggtcatcaccagggatgaaaacgagaaactggaatactatgagaagttccagatcatcgaaaacgtgtttaagcagaagaaaaagcctacactgaaacagattgctaaggagatcctggtcaacgaagaggacatcaagggctaccgggtgacaagcactggaaaaccagagttcaccaatctgaaagtgtatcacgatattaaggacatcacagcacggaaagaaatcattgagaacgccgaactgctggatcagattgctaagatcctgactatctaccagagctccgaggacatccaggaagagctgactaacctgaacagcgagctgacccaggaagagatcgaacagattagtaatctgaaggggtacaccggaacacacaacctgtccctgaaagctatcaatctgattctggatgagctgtggcatacaaacgacaatcagattgcaatctttaaccggctgaagctggtcccaaaaaaggtggacctgagtcagcagaaagagatcccaaccacactggtggacgatttcattctgtcacccgtggtcaagcggagcttcatccagagcatcaaagtgatcaacgccatcatcaagaagtacggcctgcccaatgatatcattatcgagctggctagggagaagaacagcaaggacgcacagaagatgatcaatgagatgcagaaacgaaaccggcagaccaatgaacgcattgaagagattatccgaactaccgggaaagagaacgcaaagtacctgattgaaaaaatcaagctgcacgatatgcaggagggaaagtgtctgtattctctggaggccatccccctggaggacctgctgaacaatccattcaactacgaggtcgatcatattatccccagaagcgtgtccttcgacaattcctttaacaacaaggtgctggtcaagcaggaagagaactctaaaaagggcaataggactcctttccagtacctgtctagttcagattccaagatctcttacgaaacctttaaaaagcacattctgaatctggccaaaggaaagggccgcatcagcaagaccaaaaaggagtacctgctggaagagcgggacatcaacagattctccgtccagaaggattttattaaccggaatctggtggacacaagatacgctactcgcggcctgatgaatctgctgcgatcctatttccgggtgaacaatctggatgtgaaagtcaagtccatcaacggcgggttcacatcttttctgaggcgcaaatggaagtttaaaaaggagcgcaacaaagggtacaagcaccatgccgaagatgctctgattatcgcaaatgccgacttcatctttaaggagtggaaaaagctggacaaagccaagaaagtgatggagaaccagatgttcgaagagaagcaggccgaatctatgcccgaaatcgagacagaacaggagtacaaggagattttcatcactcctcaccagatcaagcatatcaaggatttcaaggactacaagtactctcaccgggtggataaaaagcccaacagagagctgatcaatgacaccctgtatagtacaagaaaagacgataaggggaataccctgattgtgaacaatctgaacggactgtacgacaaagataatgacaagctgaaaaagctgatcaacaaaagtcccgagaagctgctgatgtaccaccatgatcctcagacatatcagaaactgaagctgattatggagcagtacggcgacgagaagaacccactgtataagtactatgaagagactgggaactacctgaccaagtatagcaaaaaggataatggccccgtgatcaagaagatcaagtactatgggaacaagctgaatgcccatctggacatcacagacgattaccctaacagtcgcaacaaggtggtcaagctgtcactgaagccatacagattcgatgtctatctggacaacggcgtgtataaatttgtgactgtcaagaatctggatgtcatcaaaaaggagaactactatgaagtgaatagcaagtgctacgaagaggctaaaaagctgaaaaagattagcaaccaggcagagttcatcgcctccttttacaacaacgacctgattaagatcaatggcgaactgtatagggtcatcggggtgaacaatgatctgctgaaccgcattgaagtgaatatgattgacatcacttaccgagagtatctggaaaacatgaatgataagcgcccccctcgaattatcaaaacaattgcctctaagactcagagtatcaaaaagtactcaaccgacattctgggaaacctgtatgaggtgaagagcaaaaagcaccctcagattatcaaaaagggcagcggaggcaagcgtcctgctgctactaagaaagctggtcaagctaagaaaaagaaaggatcctacccatacgatgttccagattacgcttaagaattcctagagctcgctgatcagcctcgactgtgccttctagttgccagccatctgttgtttgcccctcccccgtgccttccttgaccctggaaggtgccactcccactgtcctttcctaataaaatgaggaaattgcatcgcattgtctgagtaggtgtcattctattctggggggtggggtggggcaggacagcaagggggaggattgggaagagaatagcaggcatgctggggaggtagcggccgcccgcggtggagctccagcttttgttccctttagtgagggttaattgcgcgcttggcgtaatcatggtcatagctgtttcctgtgtgaaattgttatccgctcacaattccacacaacatacgagccggaagcataaagtgtaaagcctggggtgcctaatgagtgagctaactcacattaattgcgttgcgctcactgcccgctttccagtcgggaaacctgtcgtgccagctgcattaatgaatcggccaacgcgcggggagaggcggtttgcgtattgggcgctcttccgcttcctcgctcactgactcgctgcgctcggtcgttcggctgcggcgagcggtatcagctcactcaaaggcggtaatacggttatccacagaatcaggggataacgcaggaaagaacatgtgagcaaaaggccagcaaaaggccaggaaccgtaaaaaggccgcgttgctggcgtttttccataggctccgcccccctgacgagcatcacaaaaatcgacgctcaagtcagaggtggcgaaacccgacaggactataaagataccaggcgtttccccctggaagctccctcgtgcgctctcctgttccgaccctgccgcttaccggatacctgtccgcctttctcccttcgggaagcgtggcgctttctcatagctcacgctgtaggtatctcagttcggtgtaggtcgttcgctccaagctgggctgtgtgcacgaaccccccgttcagcccgaccgctgcgccttatccggtaactatcgtcttgagtccaacccggtaagacacgacttatcgccactggcagcagccactggtaacaggattagcagagcgaggtatgtaggcggtgctacagagttcttgaagtggtggcctaactacggctacactagaaggacagtatttggtatctgcgctctgctgaagccagttaccttcggaaaaagagttggtagctcttgatccggcaaacaaaccaccgctggtagcggtggtttttttgtttgcaagcagcagattacgcgcagaaaaaaaggatctcaagaagatcctttgatcttttctacggggtctgacgctcagtggaacgaaaactcacgttaagggattttggtcatgagattatcaaaaaggatcttcacctagatccttttaaattaaaaatgaagttttaaatcaatctaaagtatatatgagtaaacttggtctgacagttaccaatgcttaatcagtgaggcacctatctcagcgatctgtctatttcgttcatccatagttgcctgactccccgtcgtgtagataactacgatacgggagggcttaccatctggccccagtgctgcaatgataccgcgagacccacgctcaccggctccagatttatcagcaataaaccagccagccggaagggccgagcgcagaagtggtcctgcaactttatccgcctccatccagtctattaattgttgccgggaagctagagtaagtagttcgccagttaatagtttgcgcaacgttgttgccattgctacaggcatcgtggtgtcacgctcgtcgtttggtatggcttcattcagctccggttcccaacgatcaaggcgagttacatgatcccccatgttgtgcaaaaaagcggttagctccttcggtcctccgatcgttgtcagaagtaagttggccgcagtgttatcactcatggttatggcagcactgcataattctcttactgtcatgccatccgtaagatgcttttctgtgactggtgagtactcaaccaagtcattctgagaatagtgtatgcggcgaccgagttgctcttgcccggcgtcaatacgggataataccgcgccacatagcagaactttaaaagtgctcatcattggaaaacgttcttcggggcgaaaactctcaaggatcttaccgctgttgagatccagttcgatgtaacccactcgtgcacccaactgatcttcagcatcttttactttcaccagcgtttctgggtgagcaaaaacaggaaggcaaaatgccgcaaaaaagggaataagggcgacacggaaatgttgaatactcatactcttcctttttcaatattattgaagcatttatcagggttattgtctcatgagcggatacatatttgaatgtatttagaaaaataaacaaataggggttccgcgcacatttccccgaaaagtgccac

SEQ ID NO: 38 - DNA, 52 bp, synthetic construct
  misc_feature 1..52: note = Synthetic polynucleotide
  source 1..52: mol_type = other DNA
aatgatacggcgaccaccgagatctacacaatttcttgggtagtttgcagtt

SEQ ID NO: 39 - DNA, 51 bp, synthetic construct
  misc_feature 1..51: note = Synthetic polynucleotide
  variation 25..30: note = n is a, t, c or g
  source 1..51: mol_type = other DNA
caagcagaagacggcatacgagatnnnnnngactcggtgccactttttcaa

SEQ ID NO: 40 - DNA, 43 bp, synthetic construct
  misc_feature 1..43: note = Synthetic polynucleotide
  source 1..43: mol_type = other DNA
gatttcttggctttatatatcttgtggaaaggacgaaacaccg

SEQ ID NO: 41 - DNA, 38 bp, synthetic construct
  misc_feature 1..38: note = Synthetic polynucleotide
  source 1..38: mol_type = other DNA
gctagtccgttatcaacttgaaaaagtggcaccgagtc

SEQ ID NO: 42 - DNA, 50 bp, synthetic construct
  misc_feature 1..50: note = Synthetic polynucleotide
  source 1..50: mol_type = other DNA
gttgataacggactagccttattttaacttgctatttctagctctaaaac

SEQ ID NO: 43 - protein, 1497 aa, synthetic construct
  REGION 1..1497: note = Synthetic polypeptide
RADALDDFDLDMLGSDALDDFDLDMLGSDALDDFDLDMLGSDALDDFDLDMVNPKKKRKVGRGMDKKYSIGLAIGTNSVGWAVITDEYKVPSKKFKVLGNTDRHSIKKNLIGALLFDSGETAEATRLKRTARRRYTRRKNRICYLQEIFSNEMAKVDDSFFHRLEESFLVEEDKKHERHPIFGNIVDEVAYHEKYPTIYHLRKKLVDSTDKADLRLIYLALAHMIKFRGHFLIEGDLNPDNSDVDKLFIQLVQTYNQLFEENPINASGVDAKAILSARLSKSRRLENLIAQLPGEKKNGLFGNLIALSLGLTPNFKSNFDLAEDAKLQLSKDTYDDDLDNLLAQIGDQYADLFLAAKNLSDAILLSDILRVNTEITKAPLSASMIKRYDEHHQDLTLLKALVRQQLPEKYKEIFFDQSKNGYAGYIDGGASQEEFYKFIKPILEKMDGTEELLVKLNREDLLRKQRTFDNGSIPHQIHLGELHAILRRQEDFYPFLKDNREKIEKILTFRIPYYVGPLARGNSRFAWMTRKSEETITPWNFEEVVDKGASAQSFIERMTNFDKNLPNEKVLPKHSLLYEYFTVYNELTKVKYVTEGMRKPAFLSGEQKKAIVDLLFKTNRKVTVKQLKEDYFKKIECFDSVEISGVEDRFNASLGTYHDLLKIIKDKDFLDNEENEDILEDIVLTLTLFEDREMIEERLKTYAHLFDDKVMKQLKRRRYTGWGRLSRKLINGIRDKQSGKTILDFLKSDGFANRNFMQLIHDDSLTFKEDIQKAQVSGQGDSLHEHIANLAGSPAIKKGILQTVKVVDELVKVMGRHKPENIVIEMARENQTTQKGQKNSRERMKRIEEGIKELGSQILKEHPVENTQLQNEKLYLYYLQNGRDMYVDQELDINRLSDYDVDAIVPQSFLKDDSIDNKVLTRSDKNRGKSDNVPSEEVVKKMKNYWRQLLNAKLITQRKFDNLTKAERGGLSELDKAGFIKRQLVETRQITKHVAQILDSRMNTKYDENDKLIREVKVITLKSKLVSDFRKDFQFYKVREINNYHHAHDAYLNAVVGTALIKKYPKLESEFVYGDYKVYDVRKMIAKSEQEIGKATAKYFFYSNIMNFFKTEITLANGEIRKRPLIETNGETGEIVWDKGRDFATVRKVLSMPQVNIVKKTEVQTGGFSKESILPKRNSDKLIARKKDWDPKKYGGFDSPTVAYSVLVVAKVEKGKSKKLKSVKELLGITIMERSSFEKNPIDFLEAKGYKEVKKDLIIKLPKYSLFELENGRKRMLASAGELQKGNELALPSKYVNFLYLASHYEKLKGSPEDNEQKQLFVEQHKHYLDEIIEQISEFSKRVILADANLDKVLSAYNKHRDKPIREQAENIIHLFTLTNLGAPAAFKYFDTTIDRKRYTSTKEVLDATLIHQSITGLYETRIDLSQLGGDSRADPKKKRKVASRADALDDFDLDMLGSDALDDFDLDMLGSDALDDFDLDMLGSDALDDFDLDMLI

SEQ ID NO: 44 - DNA, 4491 bp, synthetic construct
  misc_feature 1..4491: note = Synthetic polynucleotide
  source 1..4491: mol_type = other DNA
cgggctgacgcattggacgattttgatctggatatgctgggaagtgacgccctcgatgattttgaccttgacatgcttggttcggatgcccttgatgactttgacctcgacatgctcggcagtgacgcccttgatgatttcgacctggacatggttaaccccaagaagaagaggaaggtgggccgcggaatggacaagaagtactccattgggctcgccatcggcacaaacagcgtcggctgggccgtcattacggacgagtacaaggtgccgagcaaaaaattcaaagttctgggcaataccgatcgccacagcataaagaagaacctcattggcgccctcctgttcgactccggggaaaccgccgaagccacgcggctcaaaagaacagcacggcgcagatatacccgcagaaagaatcggatctgctacctgcaggagatctttagtaatgagatggctaaggtggatgactctttcttccataggctggaggagtcctttttggtggaggaggataaaaagcacgagcgccacccaatctttggcaatatcgtggacgaggtggcgtaccatgaaaagtacccaaccatatatcatctgaggaagaagcttgtagacagtactgataaggctgacttgcggttgatctatctcgcgctggcgcatatgatcaaatttcggggacacttcctcatcgagggggacctgaacccagacaacagcgatgtcgacaaactctttatccaactggttcagacttacaatcagcttttcgaagagaacccgatcaacgcatccggagttgacgccaaagcaatcctgagcgctaggctgtccaaatcccggcggctcgaaaacctcatcgcacagctccctggggagaagaagaacggcctgtttggtaatcttatcgccctgtcactcgggctgacccccaactttaaatctaacttcgacctggccgaagatgccaagcttcaactgagcaaagacacctacgatgatgatctcgacaatctgctggcccagatcggcgaccagtacgcagacctttttttggcggcaaagaacctgtcagacgccattctgctgagtgatattctgcgagtgaacacggagatcaccaaagctccgctgagcgctagtatgatcaagcgctatgatgagcaccaccaagacttgactttgctgaaggcccttgtcagacagcaactgcctgagaagtacaaggaaattttcttcgatcagtctaaaaatggctacgccggatacattgacggcggagcaagccaggaggaattttacaaatttattaagcccatcttggaaaaaatggacggcaccgaggagctgctggtaaagcttaacagagaagatctgttgcgcaaacagcgcactttcgacaatggaagcatcccccaccagattcacctgggcgaactgcacgctatcctcaggcggcaagaggatttctacccctttttgaaagataacagggaaaagattgagaaaatcctcacatttcggataccctactatgtaggccccctcgcccggggaaattccagattcgcgtggatgactcgcaaatcagaagagaccatcactccctggaacttcgaggaagtcgtggataagggggcctctgcccagtccttcatcgaaaggatgactaactttgataaaaatctgcctaacgaaaaggtgcttcctaaacactctctgctgtacgagtacttcacagtttataacgagctcaccaaggtcaaatacgtcacagaagggatgagaaagccagcattcctgtctggagagcagaagaaagctatcgtggacctcctcttcaagacgaaccggaaagttaccgtgaaacagctcaaagaagactatttcaaaaagattgaatgtttcgactctgttgaaatcagcggagtggaggatcgcttcaacgcatccctgggaacgtatcacgatctcctgaaaatcattaaagacaaggacttcctggacaatgaggagaacgaggacattcttgaggacattgtcctcacccttacgttgtttgaagatagggagatgattgaagaacgcttgaaaacttacgctcatctcttcgacgacaaagtcatgaaacagctcaagaggcgccgatatacaggatgggggcggctgtcaagaaaactgatcaatgggatccgagacaagcagagtggaaagacaatcctggattttcttaagtccgatggatttgccaaccggaacttcatgcagttgatccatgatgactctctcacctttaaggaggacatccagaaagcacaagtttctggccagggggacagtcttcacgagcacatcgctaatcttgcaggtagcccagctatcaaaaagggaatactgcagaccgttaaggtcgtggatgaactcgtcaaagtaatgggaaggcataagcccgagaatatcgttatcgagatggcccgagagaaccaaactacccagaagggacagaagaacagtagggaaaggatgaagaggattgaagagggtataaaagaactggggtcccaaatccttaaggaacacccagttgaaaacacccagcttcagaatgagaagctctacctgtactacctgcagaacggcagggacatgtacgtggatcaggaactggacatcaatcggctctccgactacgacgtggatgccatcgtgccccagtcttttctcaaagatgattctattgataataaagtgttgacaagatccgataaaaatagagggaagagtgataacgtcccctcagaagaagttgtcaagaaaatgaaaaattattggcggcagctgctgaacgccaaactgatcacacaacggaagttcgataatctgactaaggctgaacgaggtggcctgtctgagttggataaagccggcttcatcaaaaggcagcttgttgagacacgccagatcaccaagcacgtggcccaaattctcgattcacgcatgaacaccaagtacgatgaaaatgacaaactgattcgagaggtgaaagttattactctgaagtctaagctggtctcagatttcagaaaggactttcagttttataaggtgagagagatcaacaattaccaccatgcgcatgatgcctacctgaatgcagtggtaggcactgcacttatcaaaaaatatcccaagcttgaatctgaatttgtttacggagactataaagtgtacgatgttaggaaaatgatcgcaaagtctgagcaggaaataggcaaggccaccgctaagtacttcttttacagcaatattatgaattttttcaagaccgagattacactggccaatggagagattcggaagcgaccacttatcgaaacaaacggagaaacaggagaaatcgtgtgggacaagggtagggatttcgcgacagtccggaaggtcctgtccatgccgcaggtgaacatcgttaaaaagaccgaagtacagaccggaggcttctccaaggaaagtatcctcccgaaaaggaacagcgacaagctgatcgcacgcaaaaaagattgggaccccaagaaatacggcggattcgattctcctacagtcgcttacagtgtactggttgtggccaaagtggagaaagggaagtctaaaaaactcaaaagcgtcaaggaactgctgggcatcacaatcatggagcgatcaagcttcgaaaaaaaccccatcgactttctcgaggcgaaaggatataaagaggtcaaaaaagacctcatcattaagcttcccaagtactctctctttgagcttgaaaacggccggaaacgaatgctcgctagtgcgggcgagctgcagaaaggtaacgagctggcactgccctctaaatacgttaatttcttgtatctggccagccactatgaaaagctcaaagggtctcccgaagataatgagcagaagcagctgttcgtggaacaacacaaacactaccttgatgagatcatcgagcaaataagcgaattctccaaaagagtgatcctcgccgacgctaacctcgataaggtgctttctgcttacaataagcacagggataagcccatcagggagcaggcagaaaacattatccacttgtttactctgaccaacttgggcgcgcctgcagccttcaagtacttcgacaccaccatagacagaaagcggtacacctctacaaaggaggtcctggacgccacactgattcatcagtcaattacggggctctatgaaacaagaatcgacctctctcagctcggtggagacagcagggctgaccccaagaagaagaggaaggtggctagccgcgccgacgcgctggacgatttcgatctcgacatgctgggttctgatgccctcgatgactttgacctggatatgttgggaagcgacgcattggatgactttgatctggacatgctcggctccgatgctctggacgatttcgatctcgatatgttaatc

SEQ ID NO: 45 - protein, 2414 aa, synthetic construct
  REGION 1..2414: note = Synthetic polypeptide
MAENVVEPGPPSAKRPKLSSPALSASASDGTDFGSLFDLEHDLPDELINSTELGLTNGGDINQLQTSLGMVQDAASKHKQLSELLRSGSSPNLNMGVGGPGQVMASQAQQSSPGLGLINSMVKSPMTQAGLTSPNMGMGTSGPNQGPTQSTGMMNSPVNQPAMGMNTGMNAGMNPGMLAAGNGQGIMPNQVMNGSIGAGRGRQNMQYPNPGMGSAGNLLTEPLQQGSPQMGGQTGLRGPQPLKMGMMNNPNPYGSPYTQNPGQQIGASGLGLQIQTKTVLSNNLSPFAMDKKAVPGGGMPNMGQQPAPQVQQPGLVTPVAQGMGSGAHTADPEKRKLIQQQLVLLLHAHKCQRREQANGEVRQCNLPHCRTMKNVLNHMTHCQSGKSCQVAHCASSRQIISHWKNCTRHDCPVCLPLKNAGDKRNQQPILTGAPVGLGNPSSLGVGQQSAPNLSTVSQIDPSSIERAYAALGLPYQVNQMPTQPQVQAKNQQNQQPGQSPQGMRPMSNMSASPMGVNGGVGVQTPSLLSDSMLHSAINSQNPMMSENASVPSMGPMPTAAQPSTTGIRKQWHEDITQDLRNHLVHKLVQAIFPTPDPAALKDRRMENLVAYARKVEGDMYESANNRAEYYHLLAEKIYKIQKELEEKRRTRLQKQNMLPNAAGMVPVSMNPGPNMGQPQPGMTSNGPLPDPSMIRGSVPNQMMPRITPQSGLNQFGQMSMAQPPIVPRQTPPLQHHGQLAQPGALNPPMGYGPRMQQPSNQGQFLPQTQFPSQGMNVTNIPLAPSSGQAPVSQAQMSSSSCPVNSPIMPPGSQGSHIHCPQLPQPALHQNSPSPVPSRTPTPHHTPPSIGAQQPPATTIPAPVPTPPAMPPGPQSQALHPPPRQTPTPPTTQLPQQVQPSLPAAPSADQPQQQPRSQQSTAASVPTPTAPLLPPQPATPLSQPAVSIEGQVSNPPSTSSTEVNSQAIAEKQPSQEVKMEAKMEVDQPEPADTQPEDISESKVEDCKMESTETEERSTELKTEIKEEEDQPSTSATQSSPAPGQSKKKIFKPEELRQALMPTLEALYRQDPESLPFRQPVDPQLLGIPDYFDIVKSPMDLSTIKRKLDTGQYQEPWQYVDDIWLMFNNAWLYNRKTSRVYKYCSKLSEVFEQEIDPVMQSLGYCCGRKLEFSPQTLCCYGKQLCTIPRDATYYSYQNRYHFCEKCFNEIQGESVSLGDDPSQPQTTINKEQFSKRKNDTLDPELFVECTECGRKMHQICVLHHEIIWPAGFVCDGCLKKSARTRKENKFSAKRLPSTRLGTFLENRVNDFLRRQNHPESGEVTVRVVHASDKTVEVKPGMKARFVDSGEMAESFPYRTKALFAFEEIDGVDLCFFGMHVQEYGSDCPPPNQRRVYISYLDSVHFFRPKCLRTAVYHEILIGYLEYVKKLGYTTGHIWACPPSEGDDYIFHCHPPDQKIPKPKRLQEWYKKMLDKAVSERIVHDYKDIFKQATEDRLTSAKELPYFEGDFWPNVLEESIKELEQEEEERKREENTSNESTDVTKGDSKNAKKKNNKKTSKNKSSLSRGNKKKPGMPNVSNDLSQKLYATMEKHKEVFFVIRLIAGPAANSLPPIVDPDPLIPCDLMDGRDAFLTLARDKHLEFSSLRRAQWSTMCMLVELHTQSQDRFVYTCNECKHHVETRWHCTVCEDYDLCITCYNTKNHDHKMEKLGLGLDDESNNQQAAATQSPGDSRRLSIQRCIQSLVHACQCRNANCSLPSCQKMKRVVQHTKGCKRKTNGGCPICKQLIALCCYHAKHCQENKCPVPFCLNIKQKLRQQQLQHRLQQAQMLRRRMASMQRTGVVGQQQGLPSPTPATPTTPTGQQPTTPQTPQPTSQPQPTPPNSMPPYLPRTQAAGPVSQGKAAGQVTPPTPPQTAQPPLPGPPPAAVEMAMQIQRAAETQRQMAHVQIFQRPIQHQMPPMTPMAPMGMNPPPMTRGPSGHLEPGMGPTGMQQQPPWSQGGLPQPQQLQSGMPRPAMMSVAQHGQPLNMAPQPGLGQVGISPLKPGTVSQQALQNLLRTLRSPSSPLQQQQVLSILHANPQLLAAFIKQRAAKYANSNPQPIPGQPGMPQGQPGLQPPTMPGQQGVHSNPAMQNMNPMQAGVQRAGLPQQQPQQQLQPPMGGMSPQAQQMNMNHNTMPSQFRDILRRQQMMQQQQQQGAGPGIGPGMANHNQFQQPQGVGYPPQQQQRMQHHMQQMQQGNMGQIGQLPQALGAEAGASLQAYQQRLLQQQMGSPVQPNPMSPQQHMLPNQAQSPHLQGQQIPNSLSNQVRSPQPVPSPRPQSQPPHSSPSPRMQPQPSPHHVSPQTSSPHPGLVAAQANPMEQGHFASPDQNSMLSQLASNPGMANLHGASATDLGLSTDNSDLNSNLSQSTLDIH

SEQ ID NO: 46 - protein, 617 aa, synthetic construct
  REGION 1..617: note = Synthetic polypeptide
IFKPEELRQALMPTLEALYRQDPESLPFRQPVDPQLLGIPDYFDIVKSPMDLSTIKRKLDTGQYQEPWQYVDDIWLMFNNAWLYNRKTSRVYKYCSKLSEVFEQEIDPVMQSLGYCCGRKLEFSPQTLCCYGKQLCTIPRDATYYSYQNRYHFCEKCFNEIQGESVSLGDDPSQPQTTINKEQFSKRKNDTLDPELFVECTECGRKMHQICVLHHEIIWPAGFVCDGCLKKSARTRKENKFSAKRLPSTRLGTFLENRVNDFLRRQNHPESGEVTVRVVHASDKTVEVKPGMKARFVDSGEMAESFPYRTKALFAFEEIDGVDLCFFGMHVQEYGSDCPPPNQRRVYISYLDSVHFFRPKCLRTAVYHEILIGYLEYVKKLGYTTGHIWACPPSEGDDYIFHCHPPDQKIPKPKRLQEWYKKMLDKAVSERIVHDYKDIFKQATEDRLTSAKELPYFEGDFWPNVLEESIKELEQEEEERKREENTSNESTDVTKGDSKNAKKKNNKKTSKNKSSLSRGNKKKPGMPNVSNDLSQKLYATMEKHKEVFFVIRLIAGPAANSLPPIVDPDPLIPCDLMDGRDAFLTLARDKHLEFSSLRRAQWSTMCMLVELHTQSQD

SEQ ID NO: 47 - DNA, 20 bp, synthetic construct
  misc_feature 1..20: note = Synthetic polynucleotide
  source 1..20: mol_type = other DNA
aaagcatgcgctacaataac

SEQ ID NO: 48 - DNA, 20 bp, synthetic construct
  misc_feature 1..20: note = Synthetic polynucleotide
  source 1..20: mol_type = other DNA
acagatgcgtcaggcatctc

SEQ ID NO: 49 - DNA, 20 bp, synthetic construct
  misc_feature 1..20: note = Synthetic polynucleotide
  source 1..20: mol_type = other DNA
acatcctctattctgatcat

SEQ ID NO: 50 - DNA, 20 bp, synthetic construct
  misc_feature 1..20: note = Synthetic polynucleotide
  source 1..20: mol_type = other DNA
aggagcggtcagtgacgcga

SEQ ID NO: 51 - DNA, 20 bp, synthetic construct
  misc_feature 1..20: note = Synthetic polynucleotide
  source 1..20: mol_type = other DNA
atgcctgacgcatctgtctg

SEQ ID NO: 52 - DNA, 20 bp, synthetic construct
  misc_feature 1..20: note = Synthetic polynucleotide
  source 1..20: mol_type = other DNA
cataagcaacctgggatcaa

SEQ ID NO: 53 - DNA, 20 bp, synthetic construct
  misc_feature 1..20: note = Synthetic polynucleotide
  source 1..20: mol_type = other DNA
ccaggtcattccggtgaggg

SEQ ID NO: 54 - DNA, 20 bp, synthetic construct
  misc_feature 1..20: note = Synthetic polynucleotide
  source 1..20: mol_type = other DNA
ccctcaccggaatgacctgg

SEQ ID NO: 55 - DNA, 20 bp, synthetic construct
  misc_feature 1..20: note = Synthetic polynucleotide
  source 1..20: mol_type = other DNA
ccctcaggtcttcctatgtg

SEQ ID NO: 56 - DNA, 20 bp, synthetic construct
  misc_feature 1..20: note = Synthetic polynucleotide
  source 1..20: mol_type = other DNA
ccgcacataggaagacctga

SEQ ID NO: 57 - DNA, 20 bp, synthetic construct
  misc_feature 1..20: note = Synthetic polynucleotide
  source 1..20: mol_type = other DNA
cctattgcgggtgtctgcgg

SEQ ID NO: 58 - DNA, 20 bp, synthetic construct
  misc_feature 1..20: note = Synthetic polynucleotide
  source 1..20: mol_type = other DNA
cctgtcgcgacaccacagtt

SEQ ID NO: 59 - DNA, 20 bp, synthetic construct
  misc_feature 1..20: note = Synthetic polynucleotide
  source 1..20: mol_type = other DNA
cgagcggacaggataccatc

SEQ ID NO: 60 - DNA, 20 bp, synthetic construct
  misc_feature 1..20: note = Synthetic polynucleotide
  source 1..20: mol_type = other DNA
cggtcagtgacgcgatggag

SEQ ID NO: 61 - DNA, 20 bp, synthetic construct
  misc_feature 1..20: note = Synthetic polynucleotide
  source 1..20: mol_type = other DNA
cgtggggggaccagtgcata

SEQ ID NO: 62 - DNA, 20 bp, synthetic construct
  misc_feature 1..20: note = Synthetic polynucleotide
  source 1..20: mol_type = other DNA
cgtgtggcgagggtacgtgg

SEQ ID NO: 63 - DNA, 20 bp, synthetic construct
  misc_feature 1..20: note = Synthetic polynucleotide
  source 1..20: mol_type = other DNA
ctgtcgcgacaccacagttg

SEQ ID NO: 64 - DNA, 20 bp, synthetic construct
  misc_feature 1..20: note = Synthetic polynucleotide
  source 1..20: mol_type = other DNA
gagcggacaggataccatcg

SEQ ID NO: 65 - DNA, 20 bp, synthetic construct
  misc_feature 1..20: note = Synthetic polynucleotide
  source 1..20: mol_type = other DNA
gatgcgtcaggcatctccgg

SEQ ID NO: 66 - DNA, 20 bp, synthetic construct
  misc_feature 1..20: note = Synthetic polynucleotide
  source 1..20: mol_type = other DNA
gcacgcctgcgcggccgcag

SEQ ID NO: 67 - DNA, 20 bp, synthetic construct
  misc_feature 1..20: note = Synthetic polynucleotide
  source 1..20: mol_type = other DNA
gcagcgagtctggcgcagag

SEQ ID NO: 68 - DNA, 20 bp, synthetic construct
  misc_feature 1..20: note = Synthetic polynucleotide
  source 1..20: mol_type = other DNA
gcaggctggcgcgcatgctc

SEQ ID NO: 69 - DNA, 20 bp, synthetic construct
  misc_feature 1..20: note = Synthetic polynucleotide
  source 1..20: mol_type = other DNA
gcgccccaatgcgagcggac

SEQ ID NO: 70 - DNA, 20 bp, synthetic construct
  misc_feature 1..20: note = Synthetic polynucleotide
  source 1..20: mol_type = other DNA
gcggcgacagtgggtattgg

SEQ ID NO: 71 - DNA, 20 bp, synthetic construct
  misc_feature 1..20: note = Synthetic polynucleotide
  source 1..20: mol_type = other DNA
ggcaaacaagcacgcctgcg

SEQ ID NO: 72 - DNA, 20 bp, synthetic construct
  misc_feature 1..20: note = Synthetic polynucleotide
  source 1..20: mol_type = other DNA
gggacgcgccccaatgcgag

SEQ ID NO: 73 - DNA, 20 bp, synthetic construct
  misc_feature 1..20: note = Synthetic polynucleotide
  source 1..20: mol_type = other DNA
ggtcagtgacgcgatggagc

SEQ ID NO: 74 - DNA, 20 bp, synthetic construct
  misc_feature 1..20: note = Synthetic polynucleotide
  source 1..20: mol_type = other DNA
gtcgcgacaggtcctattgc

SEQ ID NO: 75 - DNA, 20 bp, synthetic construct
  misc_feature 1..20: note = Synthetic polynucleotide
  source 1..20: mol_type = other DNA
gtgacgcgatggagcgggca

SEQ ID NO: 76 - DNA, 20 bp, synthetic construct
  misc_feature 1..20: note = Synthetic polynucleotide
  source 1..20: mol_type = other DNA
gttgtgccgttctgccccga

SEQ ID NO: 77 - DNA, 20 bp, synthetic construct
  misc_feature 1..20: note = Synthetic polynucleotide
  source 1..20: mol_type = other DNA
tccgtgtggcgagggtacgt

SEQ ID NO: 78 - DNA, 20 bp, synthetic construct
  misc_feature 1..20: note = Synthetic polynucleotide
  source 1..20: mol_type = other DNA
tgaccgaggcgaggaggcta

SEQ ID NO: 79 - DNA, 20 bp, synthetic construct
  misc_feature 1..20: note = Synthetic polynucleotide
  source 1..20: mol_type = other DNA
tgacgcatctgtctgaggag

SEQ ID NO: 80 - DNA, 20 bp, synthetic construct
  misc_feature 1..20: note = Synthetic polynucleotide
  source 1..20: mol_type = other DNA
tgccgctgctgcagcgagtc

SEQ ID NO: 81 - DNA, 20 bp, synthetic construct
  misc_feature 1..20: note = Synthetic polynucleotide
  source 1..20: mol_type = other DNA
tgcttgtttgccgcagtgca

SEQ ID NO: 82 - DNA, 20 bp, synthetic construct
  misc_feature 1..20: note = Synthetic polynucleotide
  source 1..20: mol_type = other DNA
tgtcgcgacaccacagttgg

SEQ ID NO: 83 - DNA, 20 bp, synthetic construct
  misc_feature 1..20: note = Synthetic polynucleotide
  source 1..20: mol_type = other DNA
ttaggcggaggtaggtatat

SEQ ID NO: 84 - DNA, 20 bp, synthetic construct
  misc_feature 1..20: note = Synthetic polynucleotide
  source 1..20: mol_type = other DNA
ctcaaatcaatctccctgta

SEQ ID NO: 85 - DNA, 20 bp, synthetic construct
  misc_feature 1..20: note = Synthetic polynucleotide
  source 1..20: mol_type = other DNA
ctgcaattcgttccttccag

SEQ ID NO: 86 - DNA, 20 bp, synthetic construct
  misc_feature 1..20: note = Synthetic polynucleotide
  source 1..20: mol_type = other DNA
gtgagtggaggttgactaaa

SEQ ID NO: 87 - DNA, 4560 bp, synthetic construct
  misc_feature 1..4560: note = Synthetic polynucleotide
  source 1..4560: mol_type = other DNA
atggactacaaagaccatgacggtgattataaagatcatgacatcgattacaaggatgacgatgacaagatggcccccaagaagaagaggaaggtgggccgcggaatggacaagaagtactccattgggctcgccatcggcacaaacagcgtcggctgggccgtcattacggacgagtacaaggtgccgagcaaaaaattcaaagttctgggcaataccgatcgccacagcataaagaagaacctcattggcgccctcctgttcgactccggggaaaccgccgaagccacgcggctcaaaagaacagcacggcgcagatatacccgcagaaagaatcggatctgctacctgcaggagatctttagtaatgagatggctaaggtggatgactctttcttccataggctggaggagtcctttttggtggaggaggataaaaagcacgagcgccacccaatctttggcaatatcgtggacgaggtggcgtaccatgaaaagtacccaaccatatatcatctgaggaagaagcttgtagacagtactgataaggctgacttgcggttgatctatctcgcgctggcgcatatgatcaaatttcggggacacttcctcatcgagggggacctgaacccagacaacagcgatgtcgacaaactctttatccaactggttcagacttacaatcagcttttcgaagagaacccgatcaacgcatccggagttgacgccaaagcaatcctgagcgctaggctgtccaaatcccggcggctcgaaaacctcatcgcacagctccctggggagaagaagaacggcctgtttggtaatcttatcgccctgtcactcgggctgacccccaactttaaatctaacttcgacctggccgaagatgccaagcttcaactgagcaaagacacctacgatgatgatctcgacaatctgctggcccagatcggcgaccagtacgcagacctttttttggcggcaaagaacctgtcagacgccattctgctgagtgatattctgcgagtgaacacggagatcaccaaagctccgctgagcgctagtatgatcaagcgctatgatgagcaccaccaagacttgactttgctgaaggcccttgtcagacagcaactgcctgagaagtacaaggaaattttcttcgatcagtctaaaaatggctacgccggatacattgacggcggagcaagccaggaggaattttacaaatttattaagcccatcttggaaaaaatggacggcaccgaggagctgctggtaaagcttaacagagaagatctgttgcgcaaacagcgcactttcgacaatggaagcatcccccaccagattcacctgggcgaactgcacgctatcctcaggcggcaagaggatttctacccctttttgaaagataacagggaaaagattgagaaaatcctcacatttcggataccctactatgtaggccccctcgcccggggaaattccagattcgcgtggatgactcgcaaatcagaagagaccatcactccctggaacttcgaggaagtcgtggataagggggcctctgcccagtccttcatcgaaaggatgactaactttgataaaaatctgcctaacgaaaaggtgcttcctaaacactctctgctgtacgagtacttcacagtttataacgagctcaccaaggtcaaatacgtcacagaagggatgagaaagccagcattcctgtctggagagcagaagaaagctatcgtggacctcctcttcaagacgaaccggaaagttaccgtgaaacagctcaaagaagactatttcaaaaagattgaatgtttcgactctgttgaaatcagcggagtggaggatcgcttcaacgcatccctgggaacgtatcacgatctcctgaaaatcattaaagacaaggacttcctggacaatgaggagaacgaggacattcttgaggacattgtcctcacccttacgttgtttgaagatagggagatgattgaagaacgcttgaaaacttacgctcatctcttcgacgacaaagtcatgaaacagctcaagaggcgccgatatacaggatgggggcggctgtcaagaaaactgatcaatgggatccgagacaagcagagtggaaagacaatcctggattttcttaagtccgatggatttgccaaccggaacttcatgcagttgatccatgatgactctctcacctttaaggaggacatccagaaagcacaagtttctggccagggggacagtcttcacgagcacatcgctaatcttgcaggtagcccagctatcaaaaagggaatactgcagaccgttaaggtcgtggatgaactcgtcaaagtaatgggaaggcataagcccgagaatatcgttatcgagatggcccgagagaaccaaactacccagaagggacagaagaacagtagggaaaggatgaagaggattgaagagggtataaaagaactggggtcccaaatccttaaggaacacccagttgaaaacacccagcttcagaatgagaagctctacctgtactacctgcagaacggcagggacatgtacgtggatcaggaactggacatcaatcggctctccgactacgacgtggatgccatcgtgccccagtcttttctcaaagatgattctattgataataaagtgttgacaagatccgataaaaatagagggaagagtgataacgtcccctcagaagaagttgtcaagaaaatgaaaaattattggcggcagctgctgaacgccaaactgatcacacaacggaagttcgataatctgactaaggctgaacgaggtggcctgtctgagttggataaagccggcttcatcaaaaggcagcttgttgagacacgccagatcaccaagcacgtggcccaaattctcgattcacgcatgaacaccaagtacgatgaaaatgacaaactgattcgagaggtgaaagttattactctgaagtctaagctggtctcagatttcagaaaggactttcagttttataaggtgagagagatcaacaattaccaccatgcgcatgatgcctacctgaatgcagtggtaggcactgcacttatcaaaaaatatcccaagcttgaatctgaatttgtttacggagactataaagtgtacgatgttaggaaaatgatcgcaaagtctgagcaggaaataggcaaggccaccgctaagtacttcttttacagcaatattatgaattttttcaagaccgagattacactggccaatggagagattcggaagcgaccacttatcgaaacaaacggagaaacaggagaaatcgtgtgggacaagggtagggatttcgcgacagtccggaaggtcctgtccatgccgcaggtgaacatcgttaaaaagaccgaagtacagaccggaggcttctccaaggaaagtatcctcccgaaaaggaacagcgacaagctgatcgcacgcaaaaaagattgggaccccaagaaatacggcggattcgattctcctacagtcgcttacagtgtactggttgtggccaaagtggagaaagggaagtctaaaaaactcaaaagcgtcaaggaactgctgggcatcacaatcatggagcgatcaagcttcgaaaaaaaccccatcgactttctcgaggcgaaaggatataaagaggtcaaaaaagacctcatcattaagcttcccaagtactctctctttgagcttgaaaacggccggaaacgaatgctcgctagtgcgggcgagctgcagaaaggtaacgagctggcactgccctctaaatacgttaatttcttgtatctggccagccactatgaaaagctcaaagggtctcccgaagataatgagcagaagcagctgttcgtggaacaacacaaacactaccttgatgagatcatcgagcaaataagcgaattctccaaaagagtgatcctcgccgacgctaacctcgataaggtgctttctgcttacaataagcacagggataagcccatcagggagcaggcagaaaacattatccacttgtttactctgaccaacttgggcgcgcctgcagccttcaagtacttcgacaccaccatagacagaaagcggtacacctctacaaaggaggtcctggacgccacactgattcatcagtcaattacggggctctatgaaacaagaatcgacctctctcagctcggtggagacagcagggctgaccccaagaagaagaggaaggtggctagcgatgctaagtcactgactgcctggtcccggacactggtgaccttcaaggatgtgtttgtggacttcaccagggaggagtggaagctgctggacactgctcagcagatcctgtacagaaatgtgatgctggagaactataagaacctggtttccttgggttatcagcttactaagccagatgtgatcctccggttggagaagggagaagagccctggctggtggagagagaaattcaccaagagacccatcctgattcagagactgcatttgaaatcaaatcatcagttccgaaaaagaaacgcaaagtttga

SEQ ID NO: 88 - protein, 1519 aa, synthetic construct
  REGION 1..1519: note = Synthetic polypeptide
MDYKDHDGDYKDHDIDYKDDDDKMAPKKKRKVGRGMDKKYSIGLAIGTNSVGWAVITDEYKVPSKKFKVLGNTDRHSIKKNLIGALLFDSGETAEATRLKRTARRRYTRRKNRICYLQEIFSNEMAKVDDSFFHRLEESFLVEEDKKHERHPIFGNIVDEVAYHEKYPTIYHLRKKLVDSTDKADLRLIYLALAHMIKFRGHFLIEGDLNPDNSDVDKLFIQLVQTYNQLFEENPINASGVDAKAILSARLSKSRRLENLIAQLPGEKKNGLFGNLIALSLGLTPNFKSNFDLAEDAKLQLSKDTYDDDLDNLLAQIGDQYADLFLAAKNLSDAILLSDILRVNTEITKAPLSASMIKRYDEHHQDLTLLKALVRQQLPEKYKEIFFDQSKNGYAGYIDGGASQEEFYKFIKPILEKMDGTEELLVKLNREDLLRKQRTFDNGSIPHQIHLGELHAILRRQEDFYPFLKDNREKIEKILTFRIPYYVGPLARGNSRFAWMTRKSEETITPWNFEEVVDKGASAQSFIERMTNFDKNLPNEKVLPKHSLLYEYFTVYNELTKVKYVTEGMRKPAFLSGEQKKAIVDLLFKTNRKVTVKQLKEDYFKKIECFDSVEISGVEDRFNASLGTYHDLLKIIKDKDFLDNEENEDILEDIVLTLTLFEDREMIEERLKTYAHLFDDKVMKQLKRRRYTGWGRLSRKLINGIRDKQSGKTILDFLKSDGFANRNFMQLIHDDSLTFKEDIQKAQVSGQGDSLHEHIANLAGSPAIKKGILQTVKVVDELVKVMGRHKPENIVIEMARENQTTQKGQKNSRERMKRIEEGIKELGSQILKEHPVENTQLQNEKLYLYYLQNGRDMYVDQELDINRLSDYDVDAIVPQSFLKDDSIDNKVLTRSDKNRGKSDNVPSEEVVKKMKNYWRQLLNAKLITQRKFDNLTKAERGGLSELDKAGFIKRQLVETRQITKHVAQILDSRMNTKYDENDKLIREVKVITLKSKLVSDFRKDFQFYKVREINNYHHAHDAYLNAVVGTALIKKYPKLESEFVYGDYKVYDVRKMIAKSEQEIGKATAKYFFYSNIMNFFKTEITLANGEIRKRPLIETNGETGEIVWDKGRDFATVRKVLSMPQVNIVKKTEVQTGGFSKESILPKRNSDKLIARKKDWDPKKYGGFDSPTVAYSVLVVAKVEKGKSKKLKSVKELLGITIMERSSFEKNPIDFLEAKGYKEVKKDLIIKLPKYSLFELENGRKRMLASAGELQKGNELALPSKYVNFLYLASHYEKLKGSPEDNEQKQLFVEQHKHYLDEIIEQISEFSKRVILADANLDKVLSAYNKHRDKPIREQAENIIHLFTLTNLGAPAAFKYFDTTIDRKRYTSTKEVLDATLIHQSITGLYETRIDLSQLGGDSRADPKKKRKVASDAKSLTAWSRTLVTFKDVFVDFTREEWKLLDTAQQILYRNVMLENYKNLVSLGYQLTKPDVILRLEKGEEPWLVEREIHQETHPDSETAFEIKSSVPKKKRKV

SEQ ID NO: 89 - DNA, 6459 bp, synthetic construct
  misc_feature 1..6459: note = Synthetic polynucleotide
  source 1..6459: mol_type = other DNA
atggactacaaagaccatgacggtgattataaagatcatgacatcgattacaaggatgacgatgacaagcacgttaagcgacctgccgccacaaagaaggctggacaggctaagaagaagaaactggacgttctgcccacctgcagctgtcttgatcgagttatacaaaaagacaaaggcccatattatacacaccttggggcaggaccaagtgttgctgctgtcagggaaatcatggagaataggtatggtcaaaaaggaaacgcaataaggatagaaatagtagtgtacaccggtaaagaagggaaaagctctcatgggtgtccaattgctaagtgggttttaagaagaagcagtgatgaagaaaaagttctttgtttggtccggcagcgtacaggccaccactgtccaactgctgtgatggtggtgctcatcatggtgtgggatggcatccctcttccaatggccgaccggctatacacagagctcacagagaatctaaagtcatacaatgggcaccctaccgacagaagatgcaccctcaatgaaaatcgtacctgtacatgtcaaggaattgatccagagacttgtggagcttcattctcttttggctgttcatggagtatgtactttaatggctgtaagtttggtagaagcccaagccccagaagatttagaattgatccaagctctcccttacatgaaaaaaaccttgaagataacttacagagtttggctacacgattagctccaatttataagcagtatgctccagtagcttaccaaaatcaggtggaatatgaaaatgttgcccgagaatgtcggcttggcagcaaggaaggtcgacccttctctggggtcactgcttgcctggacttctgtgctcatccccacagggacattcacaacatgaataatggaagcactgtggtttgtaccttaactcgagaagataaccgctctttgggtgttattcctcaagatgagcagctccatgtgctacctctttataagctttcagacacagatgagtttggctccaaggaaggaatggaagccaagatcaaatctggggccatcgaggtcctggcaccccgccgcaaaaaaagaacgtgtttcactcagcctgttccccgttctggaaagaagagggctgcgatgatgacagaggttcttgcacataagataagggcagtggaaaagaaacctattccccgaatcaagcggaagaataactcaacaacaacaaacaacagtaagccttcgtcactgccaaccttagggagtaacactgagaccgtgcaacctgaagtaaaaagtgaaaccgaaccccattttatcttaaaaagttcagacaacactaaaacttattcgctgatgccatccgctcctcacccagtgaaagaggcatctccaggcttctcctggtccccgaagactgcttcagccacaccagctccactgaagaatgacgcaacagcctcatgcgggttttcagaaagaagcagcactccccactgtacgatgccttcgggaagactcagtggtgccaatgctgcagctgctgatggccctggcatttcacagcttggcgaagtggctcctctccccaccctgtctgctcctgtgatggagcccctcattaattctgagccttccactggtgtgactgagccgctaacgcctcatcagccaaaccaccagccctccttcctcacctctcctcaagaccttgcctcttctccaatggaagaagatgagcagcattctgaagcagatgagcctccatcagacgaacccctatctgatgaccccctgtcacctgctgaggagaaattgccccacattgatgagtattggtcagacagtgagcacatctttttggatgcaaatattggtggggtggccatcgcacctgctcacggctcggttttgattgagtgtgcccggcgagagctgcacgctaccactcctgttgagcaccccaaccgtaatcatccaacccgcctctcccttgtcttttaccagcacaaaaacctaaataagccccaacatggttttgaactaaacaagattaagtttgaggctaaagaagctaagaataagaaaatgaaggcctcagagcaaaaagaccaggcagctaatgaaggtccagaacagtcctctgaagtaaatgaattgaaccaaattccttctcataaagcattaacattaacccatgacaatgttgtcaccgtgtccccttatgctctcacacacgttgcggggccctataaccattgggtcaaccccaagaagaagaggaaggtgggccgcggaatggacaagaagtactccattgggctcgccatcggcacaaacagcgtcggctgggccgtcattacggacgagtacaaggtgccgagcaaaaaattcaaagttctgggcaataccgatcgccacagcataaagaagaacctcattggcgccctcctgttcgactccggggaaaccgccgaagccacgcggctcaaaagaacagcacggcgcagatatacccgcagaaagaatcggatctgctacctgcaggagatctttagtaatgagatggctaaggtggatgactctttcttccataggctggaggagtcctttttggtggaggaggataaaaagcacgagcgccacccaatctttggcaatatcgtggacgaggtggcgtaccatgaaaagtacccaaccatatatcatctgaggaagaagcttgtagacagtactgataaggctgacttgcggttgatctatctcgcgctggcgcatatgatcaaatttcggggacacttcctcatcgagggggacctgaacccagacaacagcgatgtcgacaaactctttatccaactggttcagacttacaatcagcttttcgaagagaacccgatcaacgcatccggagttgacgccaaagcaatcctgagcgctaggctgtccaaatcccggcggctcgaaaacctcatcgcacagctccctggggagaagaagaacggcctgtttggtaatcttatcgccctgtcactcgggctgacccccaactttaaatctaacttcgacctggccgaagatgccaagcttcaactgagcaaagacacctacgatgatgatctcgacaatctgctggcccagatcggcgaccagtacgcagacctttttttggcggcaaagaacctgtcagacgccattctgctgagtgatattctgcgagtgaacacggagatcaccaaagctccgctgagcgctagtatgatcaagcgctatgatgagcaccaccaagacttgactttgctgaaggcccttgtcagacagcaactgcctgagaagtacaaggaaattttcttcgatcagtctaaaaatggctacgccggatacattgacggcggagcaagccaggaggaattttacaaatttattaagcccatcttggaaaaaatggacggcaccgaggagctgctggtaaagcttaacagagaagatctgttgcgcaaacagcgcactttcgacaatggaagcatcccccaccagattcacctgggcgaactgcacgctatcctcaggcggcaagaggatttctacccctttttgaaagataacagggaaaagattgagaaaatcctcacatttcggataccctactatgtaggccccctcgcccggggaaattccagattcgcgtggatgactcgcaaatcagaagagaccatcactccctggaacttcgaggaagtcgtggataagggggcctctgcccagtccttcatcgaaaggatgactaactttgataaaaatctgcctaacgaaaaggtgcttcctaaacactctctgctgtacgagtacttcacagtttataacgagctcaccaaggtcaaatacgtcacagaagggatgagaaagccagcattcctgtctggagagcagaagaaagctatcgtggacctcctcttcaagacgaaccggaaagttaccgtgaaacagctcaaagaagactatttcaaaaagattgaatgtttcgactctgttgaaatcagcggagtggaggatcgcttcaacgcatccctgggaacgtatcacgatctcctgaaaatcattaaagacaaggacttcctggacaatgaggagaacgaggacattcttgaggacattgtcctcacccttacgttgtttgaagatagggagatgattgaagaacgcttgaaaacttacgctcatctcttcgacgacaaagtcatgaaacagctcaagaggcgccgatatacaggatgggggcggctgtcaagaaaactgatcaatgggatccgagacaagcagagtggaaagacaatcctggattttcttaagtccgatggatttgccaaccggaacttcatgcagttgatccatgatgactctctcacctttaaggaggacatccagaaagcacaagtttctggccagggggacagtcttcacgagcacatcgctaatcttgcaggtagcccagctatcaaaaagggaatactgcagaccgttaaggtcgtggatgaactcgtcaaagtaatgggaaggcataagcccgagaatatcgttatcgagatggcccgagagaaccaaactacccagaagggacagaagaacagtagggaaaggatgaagaggattgaagagggtataaaagaactggggtcccaaatccttaaggaacacccagttgaaaacacccagcttcagaatgagaagctctacctgtactacctgcagaacggcagggacatgtacgtggatcaggaactggacatcaatcggctctccgactacgacgtggatgccatcgtgccccagtcttttctcaaagatgattctattgataataaagtgttgacaagatccgataaaaatagagggaagagtgataacgtcccctcagaagaagttgtcaagaaaatgaaaaattattggcggcagctgctgaacgccaaactgatcacacaacggaagttcgataatctgactaaggctgaacgaggtggcctgtctgagttggataaagccggcttcatcaaaaggcagcttgttgagacacgccagatcaccaagcacgtggcccaaattctcgattcacgcatgaacaccaagtacgatgaaaatgacaaactgattcgagaggtgaaagttattactctgaagtctaagctggtctcagatttcagaaaggactttcagttttataaggtgagagagatcaacaattaccaccatgcgcatgatgcctacctgaatgcagtggtaggcactgcacttatcaaaaaatatcccaagcttgaatctgaatttgtttacggagactataaagtgtacgatgttaggaaaatgatcgcaaagtctgagcaggaaataggcaaggccaccgctaagtacttcttttacagcaatattatgaattttttcaagaccgagattacactggccaatggagagattcggaagcgaccacttatcgaaacaaacggagaaacaggagaaatcgtgtgggacaagggtagggatttcgcgacagtccggaaggtcctgtccatgccgcaggtgaacatcgttaaaaagaccgaagtacagaccggaggcttctccaaggaaagtatcctcccgaaaaggaacagcgacaagctgatcgcacgcaaaaaagattgggaccccaagaaatacggcggattcgattctcctacagtcgcttacagtgtactggttgtggccaaagtggagaaagggaagtctaaaaaactcaaaagcgtcaaggaactgctgggcatcacaatcatggagcgatcaagcttcgaaaaaaaccccatcgactttctcgaggcgaaaggatataaagaggtcaaaaaagacctcatcattaagcttcccaagtactctctctttgagcttgaaaacggccggaaacgaatgctcgctagtgcgggcgagctgcagaaaggtaacgagctggcactgccctctaaatacgttaatttcttgtatctggccagccactatgaaaagctcaaagggtctcccgaagataatgagcagaagcagctgttcgtggaacaacacaaacactaccttgatgagatcatcgagcaaataagcgaattctccaaaagagtgatcctcgccgacgctaacctcgataaggtgctttctgcttacaataagcacagggataagcccatcagggagcaggcagaaaacattatccacttgtttactctgaccaacttgggcgcgcctgcagccttcaagtacttcgacaccaccatagacagaaagcggtacacctctacaaaggaggtcctggacgccacactgattcatcagtcaattacggggctctatgaaacaagaatcgacctctctcagctcggtggagacagcagggctgaccccaagaagaagaggaaggtgtag

SEQ ID NO: 90 - protein, 2152 aa, synthetic construct
  REGION 1..2152: note = Synthetic polypeptide
MDYKDHDGDYKDHDIDYKDDDDKHVKRPAATKKAGQAKKKKLDVLPTCSCLDRVIQKDKGPYYTHLGAGPSVAAVREIMENRYGQKGNAIRIEIVVYTGKEGKSSHGCPIAKWVLRRSSDEEKVLCLVRQRTGHHCPTAVMVVLIMVWDGIPLPMADRLYTELTENLKSYNGHPTDRRCTLNENRTCTCQGIDPETCGASFSFGCSWSMYFNGCKFGRSPSPRRFRIDPSSPLHEKNLEDNLQSLATRLAPIYKQYAPVAYQNQVEYENVARECRLGSKEGRPFSGVTACLDFCAHPHRDIHNMNNGSTVVCTLTREDNRSLGVIPQDEQLHVLPLYKLSDTDEFGSKEGMEAKIKSGAIEVLAPRRKKRTCFTQPVPRSGKKRAAMMTEVLAHKIRAVEKKPIPRIKRKNNSTTTNNSKPSSLPTLGSNTETVQPEVKSETEPHFILKSSDNTKTYSLMPSAPHPVKEASPGFSWSPKTASATPAPLKNDATASCGFSERSSTPHCTMPSGRLSGANAAAADGPGISQLGEVAPLPTLSAPVMEPLINSEPSTGVTEPLTPHQPNHQPSFLTSPQDLASSPMEEDEQHSEADEPPSDEPLSDDPLSPAEEKLPHIDEYWSDSEHIFLDANIGGVAIAPAHGSVLIECARRELHATTPVEHPNRNHPTRLSLVFYQHKNLNKPQHGFELNKIKFEAKEAKNKKMKASEQKDQAANEGPEQSSEVNELNQIPSHKALTLTHDNVVTVSPYALTHVAGPYNHWVNPKKKRKVGRGMDKKYSIGLAIGTNSVGWAVITDEYKVPSKKFKVLGNTDRHSIKKNLIGALLFDSGETAEATRLKRTARRRYTRRKNRICYLQEIFSNEMAKVDDSFFHRLEESFLVEEDKKHERHPIFGNIVDEVAYHEKYPTIYHLRKKLVDSTDKADLRLIYLALAHMIKFRGHFLIEGDLNPDNSDVDKLFIQLVQTYNQLFEENPINASGVDAKAILSARLSKSRRLENLIAQLPGEKKNGLFGNLIALSLGLTPNFKSNFDLAEDAKLQLSKDTYDDDLDNLLAQIGDQYADLFLAAKNLSDAILLSDILRVNTEITKAPLSASMIKRYDEHHQDLTLLKALVRQQLPEKYKEIFFDQSKNGYAGYIDGGASQEEFYKFIKPILEKMDGTEELLVKLNREDLLRKQRTFDNGSIPHQIHLGELHAILRRQEDFYPFLKDNREKIEKILTFRIPYYVGPLARGNSRFAWMTRKSEETITPWNFEEVVDKGASAQSFIERMTNFDKNLPNEKVLPKHSLLYEYFTVYNELTKVKYVTEGMRKPAFLSGEQKKAIVDLLFKTNRKVTVKQLKEDYFKKIECFDSVEISGVEDRFNASLGTYHDLLKIIKDKDFLDNEENEDILEDIVLTLTLFEDREMIEERLKTYAHLFDDKVMKQLKRRRYTGWGRLSRKLINGIRDKQSGKTILDFLKSDGFANRNFMQLIHDDSLTFKEDIQKAQVSGQGDSLHEHIANLAGSPAIKKGILQTVKVVDELVKVMGRHKPENIVIEMARENQTTQKGQKNSRERMKRIEEGIKELGSQILKEHPVENTQLQNEKLYLYYLQNGRDMYVDQELDINRLSDYDVDAIVPQSFLKDDSIDNKVLTRSDKNRGKSDNVPSEEVVKKMKNYWRQLLNAKLITQRKFDNLTKAERGGLSELDKAGFIKRQLVETRQITKHVAQILDSRMNTKYDENDKLIREVKVITLKSKLVSDFRKDFQFYKVREINNYHHAHDAYLNAVVGTALIKKYPKLESEFVYGDYKVYDVRKMIAKSEQEIGKATAKYFFYSNIMNFFKTEITLANGEIRKRPLIETNGETGEIVWDKGRDFATVRKVLSMPQVNIVKKTEVQTGGFSKESILPKRNSDKLIARKKDWDPKKYGGFDSPTVAYSVLVVAKVEKGKSKKLKSVKELLGITIMERSSFEKNPIDFLEAKGYKEVKKDLIIKLPKYSLFELENGRKRMLASAGELQKGNELALPSKYVNFLYLASHYEKLKGSPEDNEQKQLFVEQHKHYLDEIIEQISEFSKRVILADANLDKVLSAYNKHRDKPIREQAENIIHLFTLTNLGAPAAFKYFDTTIDRKRYTSTKEVLDATLIHQSITGLYETRIDLSQLGGDSRADPKKKRKV

SEQ ID NO: 91 - DNA, 20 bp, synthetic construct
  misc_feature 1..20: note = Artificial polynucleotide
  source 1..20: mol_type = other DNA
acccacccagcaaccaccag

SEQ ID NO: 92 - DNA, 20 bp, synthetic construct
  misc_feature 1..20: note = Artificial polynucleotide
  source 1..20: mol_type = other DNA
gacaatgacaagggttgtgg

SEQ ID NO: 93 - DNA, 20 bp, synthetic construct
  misc_feature 1..20: note = Artificial polynucleotide
  source 1..20: mol_type = other DNA
ggttttgagcaagccctcct

SEQ ID NO: 94 - DNA, 20 bp, synthetic construct
  misc_feature 1..20: note = Artificial polynucleotide
  source 1..20: mol_type = other DNA
tcgttgtgacactactgagt

SEQ ID NO: 95 - DNA, 20 bp, synthetic construct
  misc_feature 1..20: note = Artificial polynucleotide
  source 1..20: mol_type = other DNA
ctgccacgctgtgactcaga

SEQ ID NO: 96 - DNA, 20 bp, synthetic construct
  misc_feature 1..20: note = Artificial polynucleotide
  source 1..20: mol_type = other DNA
aaaatcccaaaggcttcaga

SEQ ID NO: 97 - DNA, 20 bp, synthetic construct
  misc_feature 1..20: note = Artificial polynucleotide
  source 1..20: mol_type = other DNA
aaagttataaatcacgttaa

SEQ ID NO: 98 - DNA, 20 bp, synthetic construct
  misc_feature 1..20: note = Artificial polynucleotide
  source 1..20: mol_type = other DNA
aaatgcacttacccacgtat

SEQ ID NO: 99 - DNA, 20 bp, synthetic construct
  misc_feature 1..20: note = Artificial polynucleotide
  source 1..20: mol_type = other DNA
aaatgttgtcatccatatcc

SEQ ID NO: 100 - DNA, 20 bp, synthetic construct
  misc_feature 1..20: note = Artificial polynucleotide
  source 1..20: mol_type = other DNA
aacctgaggttagcagcaag

SEQ ID NO: 101 - DNA, 20 bp, synthetic construct
  misc_feature 1..20: note = Artificial polynucleotide
  source 1..20: mol_type = other DNA
aactatatgctacctggata

SEQ ID NO: 102 - DNA, 20 bp, synthetic construct
  misc_feature 1..20: note = Artificial polynucleotide
  source 1..20: mol_type = other DNA
aactcaaatgacctctatct

SEQ ID NO: 103 - DNA, 20 bp, synthetic construct
  misc_feature 1..20: note = Artificial polynucleotide
  source 1..20: mol_type = other DNA
aactttttctttgcctgtac

SEQ ID NO: 104 - DNA, 20 bp, synthetic construct
  misc_feature 1..20: note = Artificial polynucleotide
  source 1..20: mol_type = other DNA
aagcaagaatgaatattacc

SEQ ID NO: 105 - DNA, 20 bp, synthetic construct
  misc_feature 1..20: note = Artificial polynucleotide
  source 1..20: mol_type = other DNA
aatcaatgatagctggagtg

SEQ ID NO: 106 - DNA, 20 bp, synthetic construct
  misc_feature 1..20: note = Artificial polynucleotide
  source 1..20: mol_type = other DNA
aatgcctggctgtcattcag

SEQ ID NO: 107 - DNA, 20 bp, synthetic construct
  misc_feature 1..20: note = Artificial polynucleotide
  source 1..20: mol_type = other DNA
aattcagagatcaggtcaag

SEQ ID NO: 108 - DNA, 20 bp, synthetic construct
  misc_feature 1..20: note = Artificial polynucleotide
  source 1..20: mol_type = other DNA
acacagtctgtactcactct

SEQ ID NO: 109 - DNA, 20 bp, synthetic construct
  misc_feature 1..20: note = Artificial polynucleotide
  source 1..20: mol_type = other DNA
acactacacctcaacatatc

SEQ ID NO: 110 - DNA, 20 bp, synthetic construct
  misc_feature 1..20: note = Artificial polynucleotide
  source 1..20: mol_type = other DNA
acagaccttgaaacttcaag

SEQ ID NO: 111 - DNA, 20 bp, synthetic construct
  misc_feature 1..20: note = Artificial polynucleotide
  source 1..20: mol_type = other DNA
acatgctagtagaccctgat

SEQ ID NO: 112 - DNA, 20 bp, synthetic construct
  misc_feature 1..20: note = Artificial polynucleotide
  source 1..20: mol_type = other DNA
acatttcggcaatgacacac

SEQ ID NO: 113 - DNA, 20 bp, synthetic construct
  misc_feature 1..20: note = Artificial polynucleotide
  source 1..20: mol_type = other DNA
accaactcctacccttacct

SEQ ID NO: 114 - DNA, 20 bp, synthetic construct
  misc_feature 1..20: note = Artificial polynucleotide
  source 1..20: mol_type = other DNA
accaatcccttacctggagg

SEQ ID NO: 115 - DNA, 20 bp, synthetic construct
  misc_feature 1..20: note = Artificial polynucleotide
  source 1..20: mol_type = other DNA
acccacccagcaaccaccag

SEQ ID NO: 116 - DNA, 20 bp, synthetic construct
  misc_feature 1..20: note = Artificial polynucleotide
  source 1..20: mol_type = other DNA
acccctatgaatcagtaacc

SEQ ID NO: 117 - DNA, 20 bp, synthetic construct
  misc_feature 1..20: note = Artificial polynucleotide
  source 1..20: mol_type = other DNA
accgcacataggaagacctg

SEQ ID NO: 118 - DNA, 20 bp, synthetic construct
  misc_feature 1..20: note = Artificial polynucleotide
  source 1..20: mol_type = other DNA
accgggtgatgcaagcaaca

SEQ ID NO: 119 - DNA, 20 bp, synthetic construct
  misc_feature 1..20: note = Artificial polynucleotide
  source 1..20: mol_type = other DNA
acggtgcagcagtagaggac

SEQ ID NO: 120 - DNA, 20 bp, synthetic construct
  misc_feature 1..20: note = Artificial polynucleotide
  source 1..20: mol_type = other DNA
acgtctcgccccactgcaag

SEQ ID NO: 121 - DNA, 20 bp, synthetic construct
  misc_feature 1..20: note = Artificial polynucleotide
  source 1..20: mol_type = other DNA
acgtggggggaccagtgcat

SEQ ID NO: 122 - DNA, 20 bp, synthetic construct
  misc_feature 1..20: note = Artificial polynucleotide
  source 1..20: mol_type = other DNA
acgttaacggccgggtgagg

SEQ ID NO: 123 - DNA, 20 bp, synthetic construct
  misc_feature 1..20: note = Artificial polynucleotide
  source 1..20: mol_type = other DNA
actagtaatgggtactattt

SEQ ID NO: 124 - DNA, 20 bp, synthetic construct
  misc_feature 1..20: note = Artificial polynucleotide
  source 1..20: mol_type = other DNA
actcttgccaagagtaacct

SEQ ID NO: 125 - DNA, 20 bp, synthetic construct
  misc_feature 1..20: note = Artificial polynucleotide
  source 1..20: mol_type = other DNA
actgaagacctagagaatta

SEQ ID NO: 126 - DNA, 20 bp, synthetic construct
  misc_feature 1..20: note = Artificial polynucleotide
  source 1..20: mol_type = other DNA
actgcaccctaaagagggta

SEQ ID NO: 127 - DNA, 20 bp, synthetic construct
  misc_feature 1..20: note = Artificial polynucleotide
  source 1..20: mol_type = other DNA
actgctgcaccgtgggtaag

SEQ ID NO: 128 - DNA, 20 bp, synthetic construct
  misc_feature 1..20: note = Artificial polynucleotide
  source 1..20: mol_type = other DNA
actgtctctacatttagaat

SEQ ID NO: 129 - DNA, 20 bp, synthetic construct
  misc_feature 1..20: note = Artificial polynucleotide
  source 1..20: mol_type = other DNA
agaaacatgacgaaagtgtc

SEQ ID NO: 130 - DNA, 20 bp, synthetic construct
  misc_feature 1..20: note = Artificial polynucleotide
  source 1..20: mol_type = other DNA
agaaggagggaatcctaatg

SEQ ID NO: 131 - DNA, 20 bp, synthetic construct
  misc_feature 1..20: note = Artificial polynucleotide
  source 1..20: mol_type = other DNA
agacataccagttatgatag

SEQ ID NO: 132 - DNA, 20 bp, synthetic construct
  misc_feature 1..20: note = Artificial polynucleotide
  source 1..20: mol_type = other DNA
agagcggtggctgggtggcc

SEQ ID NO: 133 - DNA, 20 bp, synthetic construct
  misc_feature 1..20: note = Artificial polynucleotide
  source 1..20: mol_type = other DNA
agatgtcaacactcctcatt

SEQ ID NO: 134 - DNA, 20 bp, synthetic construct
  misc_feature 1..20: note = Artificial polynucleotide
  source 1..20: mol_type = other DNA
agcatgcggggtaaccgcag

SEQ ID NO: 135 - DNA, 20 bp, synthetic construct
  misc_feature 1..20: note = Artificial polynucleotide
  source 1..20: mol_type = other DNA
agccagctagcatccagaaa

SEQ ID NO: 136 - DNA, 20 bp, synthetic construct
  misc_feature 1..20: note = Artificial polynucleotide
  source 1..20: mol_type = other DNA
agccatccaaagagacaaca

SEQ ID NO: 137 - DNA, 20 bp, synthetic construct
  misc_feature 1..20: note = Artificial polynucleotide
  source 1..20: mol_type = other DNA
agctagcctgaagcaggtgg

SEQ ID NO: 138 - DNA, 20 bp, synthetic construct
  misc_feature 1..20: note = Artificial polynucleotide
  source 1..20: mol_type = other DNA
aggattaggcttaaaaggac

SEQ ID NO: 139 - DNA, 20 bp, synthetic construct
  misc_feature 1..20: note = Artificial polynucleotide
  source 1..20: mol_type = other DNA
aggcttgggctgtcattcag

SEQ ID NO: 140 - DNA, 20 bp, synthetic construct
  misc_feature 1..20: note = Artificial polynucleotide
  source 1..20: mol_type = other DNA
agggcgcaatggttcatgga

SEQ ID NO: 141 - DNA, 20 bp, synthetic construct
  misc_feature 1..20: note = Artificial polynucleotide
  source 1..20: mol_type = other DNA
agggcgctgataaacaaagg

SEQ ID NO: 142 - DNA, 20 bp, synthetic construct
  misc_feature 1..20: note = Artificial polynucleotide
  source 1..20: mol_type = other DNA
agggctccaaaaagtaaacc

SEQ ID NO: 143 - DNA, 20 bp, synthetic construct
  misc_feature 1..20: note = Artificial polynucleotide
  source 1..20: mol_type = other DNA
agggtgattgcagttccgtg

SEQ ID NO: 144 - DNA, 20 bp, synthetic construct
  misc_feature 1..20: note = Artificial polynucleotide
  source 1..20: mol_type = other DNA
agtcactgcactgcgcaaat

SEQ ID NO: 145 - DNA, 20 bp, synthetic construct
  misc_feature 1..20: note = Artificial polynucleotide
  source 1..20: mol_type = other DNA
agtcattacctgagaaggca

SEQ ID NO: 146 - DNA, 20 bp, synthetic construct
  misc_feature 1..20: note = Artificial polynucleotide
  source 1..20: mol_type = other DNA
agtccacactgaggttacat

SEQ ID NO: 147 - DNA, 20 bp, synthetic construct
  misc_feature 1..20: note = Artificial polynucleotide
  source 1..20: mol_type = other DNA
agtcctctactgctgcaccg

SEQ ID NO: 148 - DNA, 20 bp, synthetic construct
  misc_feature 1..20: note = Artificial polynucleotide
  source 1..20: mol_type = other DNA
agtgtatcttctgagatcaa

SEQ ID NO: 149 - DNA, 20 bp, synthetic construct
  misc_feature 1..20: note = Artificial polynucleotide
  source 1..20: mol_type = other DNA
atactacttatatgccaatg

SEQ ID NO: 150 - DNA, 20 bp, synthetic construct
  misc_feature 1..20: note = Artificial polynucleotide
  source 1..20: mol_type = other DNA
atactcactatagtaaaaat

SEQ ID NO: 151 - DNA, 20 bp, synthetic construct
  misc_feature 1..20: note = Artificial polynucleotide
  source 1..20: mol_type = other DNA
atagtaaactctcagaaatg

SEQ ID NO: 152 - DNA, 20 bp, synthetic construct
  misc_feature 1..20: note = Artificial polynucleotide
  source 1..20: mol_type = other DNA
atagtgtatctctacccata

SEQ ID NO: 153 - DNA, 20 bp, synthetic construct
  misc_feature 1..20: note = Artificial polynucleotide
  source 1..20: mol_type = other DNA
atatggctttaaccacctct

SEQ ID NO: 154 - DNA, 20 bp, synthetic construct
  misc_feature 1..20: note = Artificial polynucleotide
  source 1..20: mol_type = other DNA
atcacgttaacggccgggtg

SEQ ID NO: 155 - DNA, 20 bp, synthetic construct
  misc_feature 1..20: note = Artificial polynucleotide
  source 1..20: mol_type = other DNA
atcccaaaggcttcagaagg

SEQ ID NO: 156 - DNA, 20 bp, synthetic construct
  misc_feature 1..20: note = Artificial polynucleotide
  source 1..20: mol_type = other DNA
atctgccatattaggatccc

SEQ ID NO: 157 - DNA, 20 bp, synthetic construct
  misc_feature 1..20: note = Artificial polynucleotide
  source 1..20: mol_type = other DNA
atcttccttacatctttggg

SEQ ID NO: 158 - DNA, 20 bp, synthetic construct
  misc_feature 1..20: note = Artificial polynucleotide
  source 1..20: mol_type = other DNA
atcttgaaggagctgcacaa

SEQ ID NO: 159 - DNA, 20 bp, synthetic construct
  misc_feature 1..20: note = Artificial polynucleotide
  source 1..20: mol_type = other DNA
atgatctatccattccgtat

SEQ ID NO: 160 - DNA, 20 bp, synthetic construct
  misc_feature 1..20: note = Artificial polynucleotide
  source 1..20: mol_type = other DNA
atgtggactaaatatgtatt

SEQ ID NO: 161 - DNA, 20 bp, synthetic construct
  misc_feature 1..20: note = Artificial polynucleotide
  source 1..20: mol_type = other DNA
atgtttgtaatagaaagtgt

SEQ ID NO: 162 - DNA, 20 bp, synthetic construct
  misc_feature 1..20: note = Artificial polynucleotide
  source 1..20: mol_type = other DNA
attaccaacccttcttctac

SEQ ID NO: 163 - DNA, 20 bp, synthetic construct
  misc_feature 1..20: note = Artificial polynucleotide
  source 1..20: mol_type = other DNA
attgtatgacacatacactt

SEQ ID NO: 164 - DNA, 20 bp, synthetic construct
  misc_feature 1..20: note = Artificial polynucleotide
  source 1..20: mol_type = other DNA
atttggactgctaacaccat

SEQ ID NO: 165 - DNA, 20 bp, synthetic construct
  misc_feature 1..20: note = Artificial polynucleotide
  source 1..20: mol_type = other DNA
caagaacacttaacagcttc

SEQ ID NO: 166 - DNA, 20 bp, synthetic construct
  misc_feature 1..20: note = Artificial polynucleotide
  source 1..20: mol_type = other DNA
caagaacctggcatatacga

SEQ ID NO: 167 - DNA, 20 bp, synthetic construct
  misc_feature 1..20: note = Artificial polynucleotide
  source 1..20: mol_type = other DNA
caatcatctactggtaagca

SEQ ID NO: 168 - DNA, 20 bp, synthetic construct
  misc_feature 1..20: note = Artificial polynucleotide
  source 1..20: mol_type = other DNA
caatcccttacctggaggtg

SEQ ID NO: 169 - DNA, 20 bp, synthetic construct
  misc_feature 1..20: note = Artificial polynucleotide
  source 1..20: mol_type = other DNA
cacacacaatgcataggaca

SEQ ID NO: 170 - DNA, 20 bp, synthetic construct
  misc_feature 1..20: note = Artificial polynucleotide
  source 1..20: mol_type = other DNA
cacccagcaaccaccagagg

SEQ ID NO: 171 - DNA, 20 bp, synthetic construct
  misc_feature 1..20: note = Artificial polynucleotide
  source 1..20: mol_type = other DNA
caccctgcatcccaactact

SEQ ID NO: 172 - DNA, 20 bp, synthetic construct
  misc_feature 1..20: note = Artificial polynucleotide
  source 1..20: mol_type = other DNA
caccggaatgacctgggggg

SEQ ID NO: 173 - DNA, 20 bp, synthetic construct
  misc_feature 1..20: note = Artificial polynucleotide
  source 1..20: mol_type = other DNA
cacctttgtattggtcatct

SEQ ID NO: 174 - DNA, 20 bp, synthetic construct
  misc_feature 1..20: note = Artificial polynucleotide
  source 1..20: mol_type = other DNA
cactacctgaacaccaccac

SEQ ID NO: 175 - DNA, 20 bp, synthetic construct
  misc_feature 1..20: note = Artificial polynucleotide
  source 1..20: mol_type = other DNA
cagaagcttcaaagagtaga

SEQ ID NO: 176 - DNA, 20 bp, synthetic construct
  misc_feature 1..20: note = Artificial polynucleotide
  source 1..20: mol_type = other DNA
cagagggcgctgataaacaa

SEQ ID NO: 177 - DNA, 20 bp, synthetic construct
  misc_feature 1..20: note = Artificial polynucleotide
  source 1..20: mol_type = other DNA
caggtcattccggtgaggga

SEQ ID NO: 178 - DNA, 20 bp, synthetic construct
  misc_feature 1..20: note = Artificial polynucleotide
  source 1..20: mol_type = other DNA
cagtagacatacttatatag

SEQ ID NO: 179 - DNA, 20 bp, synthetic construct
  misc_feature 1..20: note = Artificial polynucleotide
  source 1..20: mol_type = other DNA
cagtccttctgcgtttgact

SEQ ID NO: 180 - DNA, 20 bp, synthetic construct
  misc_feature 1..20: note = Artificial polynucleotide
  source 1..20: mol_type = other DNA
cagtgggtattggcggcggt

SEQ ID NO: 181 - DNA, 20 bp, synthetic construct
  misc_feature 1..20: note = Artificial polynucleotide
  source 1..20: mol_type = other DNA
catactagcttcctcaccaa

SEQ ID NO: 182 - DNA, 20 bp, synthetic construct
  misc_feature 1..20: note = Artificial polynucleotide
  source 1..20: mol_type = other DNA
cattcctcaaacagctccag

SEQ ID NO: 183 - DNA, 20 bp, synthetic construct
  misc_feature 1..20: note = Artificial polynucleotide
  source 1..20: mol_type = other DNA
ccaatcacccacctttctcc

SEQ ID NO: 184 - DNA, 20 bp, synthetic construct
  misc_feature 1..20: note = Artificial polynucleotide
  source 1..20: mol_type = other DNA
ccaccgcagacacccgcaat

SEQ ID NO: 185 - DNA, 20 bp, synthetic construct
  misc_feature 1..20: note = Artificial polynucleotide
  source 1..20: mol_type = other DNA
ccactacacacacaatgcat

SEQ ID NO: 186 - DNA, 20 bp, synthetic construct
  misc_feature 1..20: note = Artificial polynucleotide
  source 1..20: mol_type = other DNA
ccagtgagctagcctgaagc

SEQ ID NO: 187 - DNA, 20 bp, synthetic construct
  misc_feature 1..20: note = Artificial polynucleotide
  source 1..20: mol_type = other DNA
ccatcccacacaggcggagg

SEQ ID NO: 188 - DNA, 20 bp, synthetic construct
  misc_feature 1..20: note = Artificial polynucleotide
  source 1..20: mol_type = other DNA
cccactctaccacacaggtt

SEQ ID NO: 189 - DNA, 20 bp, synthetic construct
  misc_feature 1..20: note = Artificial polynucleotide
  source 1..20: mol_type = other DNA
cccatctcaccatgcaagag

SEQ ID NO: 190 - DNA, 20 bp, synthetic construct
  misc_feature 1..20: note = Artificial polynucleotide
  source 1..20: mol_type = other DNA
cccccacctaagatctaagt

SEQ ID NO: 191 - DNA, 20 bp, synthetic construct
  misc_feature 1..20: note = Artificial polynucleotide
  source 1..20: mol_type = other DNA
cccccaggtcattccggtga

SEQ ID NO: 192 - DNA, 20 bp, synthetic construct
  misc_feature 1..20: note = Artificial polynucleotide
  source 1..20: mol_type = other DNA
ccccccaggtcattccggtg

SEQ ID NO: 193 - DNA, 20 bp, synthetic construct
  misc_feature 1..20: note = Artificial polynucleotide
  source 1..20: mol_type = other DNA
cccctaatcccgaatagcat

SEQ ID NO: 194 - DNA, 20 bp, synthetic construct
  misc_feature 1..20: note = Artificial polynucleotide
  source 1..20: mol_type = other DNA
cccctctactgcgccacaac

SEQ ID NO: 195 - DNA, 20 bp, synthetic construct
  misc_feature 1..20: note = Artificial polynucleotide
  source 1..20: mol_type = other DNA
cccggaggcggcatgcctat

SEQ ID NO: 196 - DNA, 20 bp, synthetic construct
  misc_feature 1..20: note = Artificial polynucleotide
  source 1..20: mol_type = other DNA
ccggacagcgacaggccccg

SEQ ID NO: 197 - DNA, 20 bp, synthetic construct
  misc_feature 1..20: note = Artificial polynucleotide
  source 1..20: mol_type = other DNA
cctaaaaaatagctaaacag

SEQ ID NO: 198 - DNA, 20 bp, synthetic construct
  misc_feature 1..20: note = Artificial polynucleotide
  source 1..20: mol_type = other DNA
cctaatttacactcaccctc

SEQ ID NO: 199 - DNA, 20 bp, synthetic construct
  misc_feature 1..20: note = Artificial polynucleotide
  source 1..20: mol_type = other DNA
cctacgataggtagaaaccc

SEQ ID NO: 200 - DNA, 20 bp, synthetic construct
  misc_feature 1..20: note = Artificial polynucleotide
  source 1..20: mol_type = other DNA
cctacttagatcttaggtgg

SEQ ID NO: 201 - DNA, 20 bp, synthetic construct
  misc_feature 1..20: note = Artificial polynucleotide
  source 1..20: mol_type = other DNA
cctcaccggaatgacctggg

SEQ ID NO: 202 - DNA, 20 bp, synthetic construct
  misc_feature 1..20: note = Artificial polynucleotide
  source 1..20: mol_type = other DNA
cctccctcaccggaatgacc

SEQ ID NO: 203 - DNA, 20 bp, synthetic construct
  misc_feature 1..20: note = Artificial polynucleotide
  source 1..20: mol_type = other DNA
cctgagagtccatcatctgc

SEQ ID NO: 204 - DNA, 20 bp, synthetic construct
  misc_feature 1..20: note = Artificial polynucleotide
  source 1..20: mol_type = other DNA
cctgagggtgagtgtaaatt

SEQ ID NO: 205 - DNA, 20 bp, synthetic construct
  misc_feature 1..20: note = Artificial polynucleotide
  source 1..20: mol_type = other DNA
ccttgacattctctgtatgg

SEQ ID NO: 206 - DNA, 20 bp, synthetic construct
  misc_feature 1..20: note = Artificial polynucleotide
  source 1..20: mol_type = other DNA
cgacatagccttccaagacc

SEQ ID NO: 207 - DNA, 20 bp, synthetic construct
  misc_feature 1..20: note = Artificial polynucleotide
  source 1..20: mol_type = other DNA
cgcctaaaatccctatgcac

SEQ ID NO: 208 - DNA, 20 bp, synthetic construct
  misc_feature 1..20: note = Artificial polynucleotide
  source 1..20: mol_type = other DNA
cgcctaccagtcaactcccc

SEQ ID NO: 209 - DNA, 20 bp, synthetic construct
  misc_feature 1..20: note = Artificial polynucleotide
  source 1..20: mol_type = other DNA
cgcgacaccacagttggggg

SEQ ID NO: 210 - DNA, 20 bp, synthetic construct
  misc_feature 1..20: note = Artificial polynucleotide
  source 1..20: mol_type = other DNA
cggcagttgctcaatatgaa

SEQ ID NO: 211 - DNA, 20 bp, synthetic construct
  misc_feature 1..20: note = Artificial polynucleotide
  source 1..20: mol_type = other DNA
cgtgaagtgatcggtattta

SEQ ID NO: 212 - DNA, 20 bp, synthetic construct
  misc_feature 1..20: note = Artificial polynucleotide
  source 1..20: mol_type = other DNA
ctaaagcgagggttcctaaa

SEQ ID NO: 213 - DNA, 20 bp, synthetic construct
  misc_feature 1..20: note = Artificial polynucleotide
  source 1..20: mol_type = other DNA
ctaactacttcagttaccct

SEQ ID NO: 214 - DNA, 20 bp, synthetic construct
  misc_feature 1..20: note = Artificial polynucleotide
  source 1..20: mol_type = other DNA
ctacctcagaggagtgtcaa

SEQ ID NO: 215 - DNA, 20 bp, synthetic construct
  misc_feature 1..20: note = Artificial polynucleotide
  source 1..20: mol_type = other DNA
ctacctgctgaaatcagtga

SEQ ID NO: 216 - DNA, 20 bp, synthetic construct
  misc_feature 1..20: note = Artificial polynucleotide
  source 1..20: mol_type = other DNA
ctactgcgccacaaccggaa

SEQ ID NO: 217 - DNA, 20 bp, synthetic construct
  misc_feature 1..20: note = Artificial polynucleotide
  source 1..20: mol_type = other DNA
ctactgctgcaccgtgggta

SEQ ID NO: 218 - DNA, 20 bp, synthetic construct
  misc_feature 1..20: note = Artificial polynucleotide
  source 1..20: mol_type = other DNA
ctattggcgtccctcgagca

SEQ ID NO: 219 - DNA, 20 bp, synthetic construct
  misc_feature 1..20: note = Artificial polynucleotide
  source 1..20: mol_type = other DNA
ctcataaaatggctgctcaa

SEQ ID NO: 220 - DNA, 20 bp, synthetic construct
  misc_feature 1..20: note = Artificial polynucleotide
  source 1..20: mol_type = other DNA
ctcctacttagatcttaggt

SEQ ID NO: 221 - DNA, 20 bp, synthetic construct
  misc_feature 1..20: note = Artificial polynucleotide
  source 1..20: mol_type = other DNA
ctctacacagagattgtaca

SEQ ID NO: 222 - DNA, 20 bp, synthetic construct
  misc_feature 1..20: note = Artificial polynucleotide
  source 1..20: mol_type = other DNA
ctctcattgcaacagtgctg

SEQ ID NO: 223 - DNA, 20 bp, synthetic construct
  misc_feature 1..20: note = Artificial polynucleotide
  source 1..20: mol_type = other DNA
ctgagctcagagccttctgt

SEQ ID NO: 224 - DNA, 20 bp, synthetic construct
  misc_feature 1..20: note = Artificial polynucleotide
  source 1..20: mol_type = other DNA
ctggcgcgcatgctcaggcg

SEQ ID NO: 225 - DNA, 20 bp, synthetic construct
  misc_feature 1..20: note = Artificial polynucleotide
  source 1..20: mol_type = other DNA
cttaatgattatctctgggg

SEQ ID NO: 226 - DNA, 20 bp, synthetic construct
  misc_feature 1..20: note = Artificial polynucleotide
  source 1..20: mol_type = other DNA
cttaccactgcaccctaaag

SEQ ID NO: 227 - DNA, 20 bp, synthetic construct
  misc_feature 1..20: note = Artificial polynucleotide
  source 1..20: mol_type = other DNA
cttactcaagggaaaagctt

SEQ ID NO: 228 - DNA, 20 bp, synthetic construct
  misc_feature 1..20: note = Artificial polynucleotide
  source 1..20: mol_type = other DNA
cttatgatttggtaggaagt

SEQ ID NO: 229 - DNA, 20 bp, synthetic construct
  misc_feature 1..20: note = Artificial polynucleotide
  source 1..20: mol_type = other DNA
cttgcagtggggcgagacgt

SEQ ID NO: 230 - DNA, 20 bp, synthetic construct
  misc_feature 1..20: note = Artificial polynucleotide
  source 1..20: mol_type = other DNA
cttgttggcatgtaaggatt

SEQ ID NO: 231 - DNA, 20 bp, synthetic construct
  misc_feature 1..20: note = Artificial polynucleotide
  source 1..20: mol_type = other DNA
gaaacatgacgaaagtgtca

SEQ ID NO: 232 - DNA, 20 bp, synthetic construct
  misc_feature 1..20: note = Artificial polynucleotide
  source 1..20: mol_type = other DNA
gaaaggtctgaggtcaactg

SEQ ID NO: 233 - DNA, 20 bp, synthetic construct
  misc_feature 1..20: note = Artificial polynucleotide
  source 1..20: mol_type = other DNA
gaacagtgataggcaaagag

SEQ ID NO: 234 - DNA, 20 bp, synthetic construct
  misc_feature 1..20: note = Artificial polynucleotide
  source 1..20: mol_type = other DNA
gaacatttgactaccagacc

SEQ ID NO: 235 - DNA, 20 bp, synthetic construct
  misc_feature 1..20: note = Artificial polynucleotide
  source 1..20: mol_type = other DNA
gaacctgaggttagcagcaa

SEQ ID NO: 236 - DNA, 20 bp, synthetic construct
  misc_feature 1..20: note = Artificial polynucleotide
  source 1..20: mol_type = other DNA
gaacttccagggctatttaa

SEQ ID NO: 237 - DNA, 20 bp, synthetic construct
  misc_feature 1..20: note = Artificial polynucleotide
  source 1..20: mol_type = other DNA
gaattgttgggagacctatc

SEQ ID NO: 238 - DNA, 20 bp, synthetic construct
  misc_feature 1..20: note = Artificial polynucleotide
  source 1..20: mol_type = other DNA
gacctcctacagcagttaaa

SEQ ID NO: 239 - DNA, 20 bp, synthetic construct
  misc_feature 1..20: note = Artificial polynucleotide
  source 1..20: mol_type = other DNA
gactttggcggcggtaggca

SEQ ID NO: 240 - DNA, 20 bp, synthetic construct
  misc_feature 1..20: note = Artificial polynucleotide
  source 1..20: mol_type = other DNA
gatctgccatattaggatcc

SEQ ID NO: 241 - DNA, 20 bp, synthetic construct
  misc_feature 1..20: note = Artificial polynucleotide
  source 1..20: mol_type = other DNA
gatgtacaacctaaccctca

SEQ ID NO: 242 - DNA, 20 bp, synthetic construct
  misc_feature 1..20: note = Artificial polynucleotide
  source 1..20: mol_type = other DNA
gattcaaagaggaaatacat

SEQ ID NO: 243 - DNA, 20 bp, synthetic construct
  misc_feature 1..20: note = Artificial polynucleotide
  source 1..20: mol_type = other DNA
gattcctcgctactccaata

SEQ ID NO: 244 - DNA, 20 bp, synthetic construct
  misc_feature 1..20: note = Artificial polynucleotide
  source 1..20: mol_type = other DNA
gcaaaccagatgaccatcgc

SEQ ID NO: 245 - DNA, 20 bp, synthetic construct
  misc_feature 1..20: note = Artificial polynucleotide
  source 1..20: mol_type = other DNA
gcaaggtagtaaacaagtgc

SEQ ID NO: 246 - DNA, 20 bp, synthetic construct
  misc_feature 1..20: note = Artificial polynucleotide
  source 1..20: mol_type = other DNA
gcaatgagaatccatatcca

SEQ ID NO: 247 - DNA, 20 bp, synthetic construct
  misc_feature 1..20: note = Artificial polynucleotide
  source 1..20: mol_type = other DNA
gcagatctaagccgctgcag

SEQ ID NO: 248 - DNA, 20 bp, synthetic construct
  misc_feature 1..20: note = Artificial polynucleotide
  source 1..20: mol_type = other DNA
gcaggacagtccttcaccac

SEQ ID NO: 249 - DNA, 20 bp, synthetic construct
  misc_feature 1..20: note = Artificial polynucleotide
  source 1..20: mol_type = other DNA
gcagggtacgtggggcgact

SEQ ID NO: 250 - DNA, 20 bp, synthetic construct
  misc_feature 1..20: note = Artificial polynucleotide
  source 1..20: mol_type = other DNA
gcctctgaacattccggatc

SEQ ID NO: 251 - DNA, 20 bp, synthetic construct
  misc_feature 1..20: note = Artificial polynucleotide
  source 1..20: mol_type = other DNA
gcgaaggtacgtgaagtgat

SEQ ID NO: 252 - DNA, 20 bp, synthetic construct
  misc_feature 1..20: note = Artificial polynucleotide
  source 1..20: mol_type = other DNA
gcgacagtgggtattggcgg

SEQ ID NO: 253 - DNA, 20 bp, synthetic construct
  misc_feature 1..20: note = Artificial polynucleotide
  source 1..20: mol_type = other DNA
gcgcacaatacaaccaagag

SEQ ID NO: 254 - DNA, 20 bp, synthetic construct
  misc_feature 1..20: note = Artificial polynucleotide
  source 1..20: mol_type = other DNA
gcgcagttgtaccatgaatg

SEQ ID NO: 255 - DNA, 20 bp, synthetic construct
  misc_feature 1..20: note = Artificial polynucleotide
  source 1..20: mol_type = other DNA
gcggctctacagggaggaag

SEQ ID NO: 256 - DNA, 20 bp, synthetic construct
  misc_feature 1..20: note = Artificial polynucleotide
  source 1..20: mol_type = other DNA
gctacaatgaaactttggag

SEQ ID NO: 257 - DNA, 20 bp, synthetic construct
  misc_feature 1..20: note = Artificial polynucleotide
  source 1..20: mol_type = other DNA
gctcatcacaaatccagccc

SEQ ID NO: 258 - DNA, 20 bp, synthetic construct
  misc_feature 1..20: note = Artificial polynucleotide
  source 1..20: mol_type = other DNA
gctcatgaaactttcatata

SEQ ID NO: 259 - DNA, 20 bp, synthetic construct
  misc_feature 1..20: note = Artificial polynucleotide
  source 1..20: mol_type = other DNA
gctcctcagacagatgcgtc

SEQ ID NO: 260 - DNA, 20 bp, synthetic construct
  misc_feature 1..20: note = Artificial polynucleotide
  source 1..20: mol_type = other DNA
gctggcgcgcatgctcaggc

SEQ ID NO: 261 - DNA, 20 bp, synthetic construct
  misc_feature 1..20: note = Artificial polynucleotide
  source 1..20: mol_type = other DNA
gctgttctgtagttcgtctc

SEQ ID NO: 262 - DNA, 20 bp, synthetic construct
  misc_feature 1..20: note = Artificial polynucleotide
  source 1..20: mol_type = other DNA
gcttctgaagacctagggga

SEQ ID NO: 263 - DNA, 20 bp, synthetic construct
  misc_feature 1..20: note = Artificial polynucleotide
  source 1..20: mol_type = other DNA
gcttgtttgccgcagtgcag

SEQ ID NO: 264 - DNA, 20 bp, synthetic construct
  misc_feature 1..20: note = Artificial polynucleotide
  source 1..20: mol_type = other DNA
ggaaaataaaacagcatgta

SEQ ID NO: 265 - DNA, 20 bp, synthetic construct
  misc_feature 1..20: note = Artificial polynucleotide
  source 1..20: mol_type = other DNA
ggaattcgtcgcagtgaccg

SEQ ID NO: 266 - DNA, 20 bp, synthetic construct
  misc_feature 1..20: note = Artificial polynucleotide
  source 1..20: mol_type = other DNA
ggacctcacgctccctttgc

SEQ ID NO: 267 - DNA, 20 bp, synthetic construct
  misc_feature 1..20: note = Artificial polynucleotide
  source 1..20: mol_type = other DNA
ggactatccagagattaaga

SEQ ID NO: 268 - DNA, 20 bp, synthetic construct
  misc_feature 1..20: note = Artificial polynucleotide
  source 1..20: mol_type = other DNA
ggcaaagagaggataccaaa

SEQ ID NO: 269 - DNA, 20 bp, synthetic construct
  misc_feature 1..20: note = Artificial polynucleotide
  source 1..20: mol_type = other DNA
ggcggagtgccccgtcctgg

SEQ ID NO: 270 - DNA, 20 bp, synthetic construct
  misc_feature 1..20: note = Artificial polynucleotide
  source 1..20: mol_type = other DNA
ggctatgtcgaaataacctg

SEQ ID NO: 271 - DNA, 20 bp, synthetic construct
  misc_feature 1..20: note = Artificial polynucleotide
  source 1..20: mol_type = other DNA
ggctctcctacttagatctt

SEQ ID NO: 272 - DNA, 20 bp, synthetic construct
  misc_feature 1..20: note = Artificial polynucleotide
  source 1..20: mol_type = other DNA
ggctggcgcgcatgctcagg

SEQ ID NO: 273 - DNA, 20 bp, synthetic construct
  misc_feature 1..20: note = Artificial polynucleotide
  source 1..20: mol_type = other DNA
gggaagttgactctgatcac

SEQ ID NO: 274 - DNA, 20 bp, synthetic construct
  misc_feature 1..20: note = Artificial polynucleotide
  source 1..20: mol_type = other DNA
ggggttgctctgccgacggg

SEQ ID NO: 275 - DNA, 20 bp, synthetic construct
  misc_feature 1..20: note = Artificial polynucleotide
  source 1..20: mol_type = other DNA
gggtggctgccaagcttgct

SEQ ID NO: 276 - DNA, 20 bp, synthetic construct
  misc_feature 1..20: note = Artificial polynucleotide
  source 1..20: mol_type = other DNA
gggtggtactgagaaactaa

SEQ ID NO: 277 - DNA, 20 bp, synthetic construct
  misc_feature 1..20: note = Artificial polynucleotide
  source 1..20: mol_type = other DNA
gggttgctctgccgacgggt

SEQ ID NO: 278 - DNA, 20 bp, synthetic construct
  misc_feature 1..20: note = Artificial polynucleotide
  source 1..20: mol_type = other DNA
ggtatcctgtccgctcgcat

SEQ ID NO: 279 - DNA, 20 bp, synthetic construct
  misc_feature 1..20: note = Artificial polynucleotide
  source 1..20: mol_type = other DNA
gtaggaagtaggagatgaat

SEQ ID NO: 280 - DNA, 20 bp, synthetic construct
  misc_feature 1..20: note = Artificial polynucleotide
  source 1..20: mol_type = other DNA
gtataatagtgaccactgcg

SEQ ID NO: 281 - DNA, 20 bp, synthetic construct
  misc_feature 1..20: note = Artificial polynucleotide
  source 1..20: mol_type = other DNA
gtatatattgaaagtataaa

SEQ ID NO: 282 - DNA, 20 bp, synthetic construct
  misc_feature 1..20: note = Artificial polynucleotide
  source 1..20: mol_type = other DNA
gtatcagaggtaaacatacc

SEQ ID NO: 283 - DNA, 20 bp, synthetic construct
  misc_feature 1..20: note = Artificial polynucleotide
  source 1..20: mol_type = other DNA
gtatcctgtccgctcgcatt

SEQ ID NO: 284 - DNA, 20 bp, synthetic construct
  misc_feature 1..20: note = Artificial polynucleotide
  source 1..20: mol_type = other DNA
gtcacagtgtgcggcaccag

SEQ ID NO: 285 - DNA, 20 bp, synthetic construct
  misc_feature 1..20: note = Artificial polynucleotide
  source 1..20: mol_type = other DNA
gtcatttcatccggcctcat

SEQ ID NO: 286 - DNA, 20 bp, synthetic construct
  misc_feature 1..20: note = Artificial polynucleotide
  source 1..20: mol_type = other DNA
gtcccccaactcctcggaca

SEQ ID NO: 287 - DNA, 20 bp, synthetic construct
  misc_feature 1..20: note = Artificial polynucleotide
  source 1..20: mol_type = other DNA
gtcctctactgctgcaccgt

SEQ ID NO: 288 - DNA, 20 bp, synthetic construct
  misc_feature 1..20: note = Artificial polynucleotide
  source 1..20: mol_type = other DNA
gtctagtgaggcacactgac

SEQ ID NO: 289 - DNA, 20 bp, synthetic construct
  misc_feature 1..20: note = Artificial polynucleotide
  source 1..20: mol_type = other DNA
gtcttgtaaagatacagcaa

SEQ ID NO: 290 - DNA, 20 bp, synthetic construct
  misc_feature 1..20: note = Artificial polynucleotide
  source 1..20: mol_type = other DNA
gtgacacagaactgaaataa

SEQ ID NO: 291 - DNA, 20 bp, synthetic construct
  misc_feature 1..20: note = Artificial polynucleotide
  source 1..20: mol_type = other DNA
gtgacgcaacacagaccccc

SEQ ID NO: 292 - DNA, 20 bp, synthetic construct
  misc_feature 1..20: note = Artificial polynucleotide
  source 1..20: mol_type = other DNA
gtgagctagcctgaagcagg

SEQ ID NO: 293 - DNA, 20 bp, synthetic construct
  misc_feature 1..20: note = Artificial polynucleotide
  source 1..20: mol_type = other DNA
gtgtataaaggattcaagaa

SEQ ID NO: 294 - DNA, 20 bp, synthetic construct
  misc_feature 1..20: note = Artificial polynucleotide
  source 1..20: mol_type = other DNA
gtgttcaccaatcccttacc

SEQ ID NO: 295 - DNA, 20 bp, synthetic construct
  misc_feature 1..20: note = Artificial polynucleotide
  source 1..20: mol_type = other DNA
gtgttttctgttggggtgat

SEQ ID NO: 296 - DNA, 20 bp, synthetic construct
  misc_feature 1..20: note = Artificial polynucleotide
  source 1..20: mol_type = other DNA
gttagagtactacttcttct

SEQ ID NO: 297 - DNA, 20 bp, synthetic construct
  misc_feature 1..20: note = Artificial polynucleotide
  source 1..20: mol_type = other DNA
taactcaaatgacctctatc

SEQ ID NO: 298 - DNA, 20 bp, synthetic construct
  misc_feature 1..20: note = Artificial polynucleotide
  source 1..20: mol_type = other DNA
taagatgacagagccctcac

SEQ ID NO: 299 - DNA, 20 bp, synthetic construct
  misc_feature 1..20: note = Artificial polynucleotide
  source 1..20: mol_type = other DNA
tacaggccctaaatcaatcc

SEQ ID NO: 300 - DNA, 20 bp, synthetic construct
  misc_feature 1..20: note = Artificial polynucleotide
  source 1..20: mol_type = other DNA
tacccacggtgcagcagtag

SEQ ID NO: 301 - DNA, 20 bp, synthetic construct
  misc_feature 1..20: note = Artificial polynucleotide
  source 1..20: mol_type = other DNA
tactgctgcaccgtgggtaa

SEQ ID NO: 302 - DNA, 20 bp, synthetic construct
  misc_feature 1..20: note = Artificial polynucleotide
  source 1..20: mol_type = other DNA
tagaggtgagtgggagcata

SEQ ID NO: 303 - DNA, 20 bp, synthetic construct
  misc_feature 1..20: note = Artificial polynucleotide
  source 1..20: mol_type = other DNA
tagatgaactaaagaacctg

SEQ ID NO: 304 - DNA, 20 bp, synthetic construct
  misc_feature 1..20: note = Artificial polynucleotide
  source 1..20: mol_type = other DNA
tagcatggttgactatctgt

SEQ ID NO: 305 - DNA, 20 bp, synthetic construct
  misc_feature 1..20: note = Artificial polynucleotide
  source 1..20: mol_type = other DNA
tagtgttaggaagatcaaat

SEQ ID NO: 306 - DNA, 20 bp, synthetic construct
  misc_feature 1..20: note = Artificial polynucleotide
  source 1..20: mol_type = other DNA
tatagaagctaacatgggaa

SEQ ID NO: 307 - DNA, 20 bp, synthetic construct
  misc_feature 1..20: note = Artificial polynucleotide
  source 1..20: mol_type = other DNA
tatccgggctccgggtctct

SEQ ID NO: 308 - DNA, 20 bp, synthetic construct
  misc_feature 1..20: note = Artificial polynucleotide
  source 1..20: mol_type = other DNA
tatccttaacctgtactgat

SEQ ID NO: 309 - DNA, 20 bp, synthetic construct
  misc_feature 1..20: note = Artificial polynucleotide
  source 1..20: mol_type = other DNA
tatggtgagcagttccccaa

SEQ ID NO: 310 - DNA, 20 bp, synthetic construct
  misc_feature 1..20: note = Artificial polynucleotide
  source 1..20: mol_type = other DNA
tattggcgtccctcgagcag

SEQ ID NO: 311 - DNA, 20 bp, synthetic construct
  misc_feature 1..20: note = Artificial polynucleotide
  source 1..20: mol_type = other DNA
tatacacactcctagtataa

SEQ ID NO: 312 - DNA, 20 bp, synthetic construct
  misc_feature 1..20: note = Artificial polynucleotide
  source 1..20: mol_type = other DNA
tcaactaagtggtcaaaaaa

SEQ ID NO: 313 - DNA, 20 bp, synthetic construct
  misc_feature 1..20: note = Artificial polynucleotide
  source 1..20: mol_type = other DNA
tcaagaacctggcatatacg

SEQ ID NO: 314 - DNA, 20 bp, synthetic construct
  misc_feature 1..20: note = Artificial polynucleotide
  source 1..20: mol_type = other DNA
tcacataaaaactacctcag

SEQ ID NO: 315 - DNA, 20 bp, synthetic construct
  misc_feature 1..20: note = Artificial polynucleotide
  source 1..20: mol_type = other DNA
tcacctctaatgcctggtgg

SEQ ID NO: 316 - DNA, 20 bp, synthetic construct
  misc_feature 1..20: note = Artificial polynucleotide
  source 1..20: mol_type = other DNA
tcacgtaatggggacacatt

SEQ ID NO: 317 - DNA, 20 bp, synthetic construct
  misc_feature 1..20: note = Artificial polynucleotide
  source 1..20: mol_type = other DNA
tcactactgtaaaacaagct

SEQ ID NO: 318 - DNA, 20 bp, synthetic construct
  misc_feature 1..20: note = Artificial polynucleotide
  source 1..20: mol_type = other DNA
tcactcttggttgctcagtg

SEQ ID NO: 319 - DNA, 20 bp, synthetic construct
  misc_feature 1..20: note = Artificial polynucleotide
  source 1..20: mol_type = other DNA
tcatactagcttcctcacca

SEQ ID NO: 320 - DNA, 20 bp, synthetic construct
  misc_feature 1..20: note = Artificial polynucleotide
  source 1..20: mol_type = other DNA
tccatgttcaattcaggttg

SEQ ID NO: 321 - DNA, 20 bp, synthetic construct
  misc_feature 1..20: note = Artificial polynucleotide
  source 1..20: mol_type = other DNA
tcccaatactacttatgatt

SEQ ID NO: 322 - DNA, 20 bp, synthetic construct
  misc_feature 1..20: note = Artificial polynucleotide
  source 1..20: mol_type = other DNA
tcccactcacctctaatgcc

SEQ ID NO: 323 - DNA, 20 bp, synthetic construct
  misc_feature 1..20: note = Artificial polynucleotide
  source 1..20: mol_type = other DNA
tccctcaccggaatgacctg

SEQ ID NO: 324 - DNA, 20 bp, synthetic construct
  misc_feature 1..20: note = Artificial polynucleotide
  source 1..20: mol_type = other DNA
tcctacttagatcttaggtg

SEQ ID NO: 325 - DNA, 20 bp, synthetic construct
  misc_feature 1..20: note = Artificial polynucleotide
  source 1..20: mol_type = other DNA
tcgttgtgacactactgagt

SEQ ID NO: 326 - DNA, 20 bp, synthetic construct
  misc_feature 1..20: note = Artificial polynucleotide
  source 1..20: mol_type = other DNA
tctacacagagattgtacaa

SEQ ID NO: 327 - DNA, 20 bp, synthetic construct
  misc_feature 1..20: note = Artificial polynucleotide
  source 1..20: mol_type = other DNA
tctatcataactggtatgtc

SEQ ID NO: 328 - DNA, 20 bp, synthetic construct
  misc_feature 1..20: note = Artificial polynucleotide
  source 1..20: mol_type = other DNA
tctcctacttagatcttagg

SEQ ID NO: 329 - DNA, 20 bp, synthetic construct
  misc_feature 1..20: note = Artificial polynucleotide
  source 1..20: mol_type = other DNA
tctcgccccactgcaagcgg

SEQ ID NO: 330 - DNA, 20 bp, synthetic construct
  misc_feature 1..20: note = Artificial polynucleotide
  source 1..20: mol_type = other DNA
tctgacctaattcagagatc

SEQ ID NO: 331 - DNA, 20 bp, synthetic construct
  misc_feature 1..20: note = Artificial polynucleotide
  source 1..20: mol_type = other DNA
tcttggtggacgcattcctg

SEQ ID NO: 332 - DNA, 20 bp, synthetic construct
  misc_feature 1..20: note = Artificial polynucleotide
  source 1..20: mol_type = other DNA
tgaaaaggtacgattttcca

SEQ ID NO: 333 - DNA, 20 bp, synthetic construct
  misc_feature 1..20: note = Artificial polynucleotide
  source 1..20: mol_type = other DNA
tgaagtgatcggtatttagg

SEQ ID NO: 334 - DNA, 20 bp, synthetic construct
  misc_feature 1..20: note = Artificial polynucleotide
  source 1..20: mol_type = other DNA
tgagctcagagccttctgtg

SEQ ID NO: 335 - DNA, 20 bp, synthetic construct
  misc_feature 1..20: note = Artificial polynucleotide
  source 1..20: mol_type = other DNA
tgcatagggattttaggcgg

SEQ ID NO: 336 - DNA, 20 bp, synthetic construct
  misc_feature 1..20: note = Artificial polynucleotide
  source 1..20: mol_type = other DNA
tgccttagacaacaacataa

SEQ ID NO: 337 - DNA, 20 bp, synthetic construct
  misc_feature 1..20: note = Artificial polynucleotide
  source 1..20: mol_type = other DNA
tgctgtatcagccaggtgaa

SEQ ID NO: 338 - DNA, 20 bp, synthetic construct
  misc_feature 1..20: note = Artificial polynucleotide
  source 1..20: mol_type = other DNA
tggaaaacacattctaggac

SEQ ID NO: 339 - DNA, 20 bp, synthetic construct
  misc_feature 1..20: note = Artificial polynucleotide
  source 1..20: mol_type = other DNA
tggccagaatgtccaccgtg

SEQ ID NO: 340 - DNA, 20 bp, synthetic construct
  misc_feature 1..20: note = Artificial polynucleotide
  source 1..20: mol_type = other DNA
tggctgccaagcttgctagg

SEQ ID NO: 341 - DNA, 20 bp, synthetic construct
  misc_feature 1..20: note = Artificial polynucleotide
  source 1..20: mol_type = other DNA
tggggaattggcacaccagc

SEQ ID NO: 342 - DNA, 20 bp, synthetic construct
  misc_feature 1..20: note = Artificial polynucleotide
  source 1..20: mol_type = other DNA
tgtagcatgcttttagagtt

SEQ ID NO: 343 - DNA, 20 bp, synthetic construct
  misc_feature 1..20: note = Artificial polynucleotide
  source 1..20: mol_type = other DNA
tgtcgcgacaggtcctattg

SEQ ID NO: 344 - DNA, 20 bp, synthetic construct
  misc_feature 1..20: note = Artificial polynucleotide
  source 1..20: mol_type = other DNA
tgtgaatttgtaaccaccca

SEQ ID NO: 345 - DNA, 20 bp, synthetic construct
  misc_feature 1..20: note = Artificial polynucleotide
  source 1..20: mol_type = other DNA
tgttggggctccagcaatac

SEQ ID NO: 346 - DNA, 20 bp, synthetic construct
  misc_feature 1..20: note = Artificial polynucleotide
  source 1..20: mol_type = other DNA
ttaaactctcctatacggaa

SEQ ID NO: 347 - DNA, 20 bp, synthetic construct
  misc_feature 1..20: note = Artificial polynucleotide
  source 1..20: mol_type = other DNA
ttacactgaaagtaataatc

SEQ ID NO: 348 - DNA, 20 bp, synthetic construct
  misc_feature 1..20: note = Artificial polynucleotide
  source 1..20: mol_type = other DNA
ttcaacatatcctacaactg

SEQ ID NO: 349 - DNA, 20 bp, synthetic construct
  misc_feature 1..20: note = Artificial polynucleotide
  source 1..20: mol_type = other DNA
ttcaaccagagatgtttcat

SEQ ID NO: 350 - DNA, 20 bp, synthetic construct
  misc_feature 1..20: note = Artificial polynucleotide
  source 1..20: mol_type = other DNA
ttcaccaatcccttacctgg

SEQ ID NO: 351 - DNA, 20 bp, synthetic construct
  misc_feature 1..20: note = Artificial polynucleotide
  source 1..20: mol_type = other DNA
ttccggttgtggcgcagtag

SEQ ID NO: 352 - DNA, 20 bp, synthetic construct
  misc_feature 1..20: note = Artificial polynucleotide
  source 1..20: mol_type = other DNA
ttccgtgtggcgagggtacg

SEQ ID NO: 353 - DNA, 20 bp, synthetic construct
  misc_feature 1..20: note = Artificial polynucleotide
  source 1..20: mol_type = other DNA
ttctacaggaatactagtaa

SEQ ID NO: 354 - DNA, 20 bp, synthetic construct
  misc_feature 1..20: note = Artificial polynucleotide
  source 1..20: mol_type = other DNA
ttgctgcattagctctaacc

SEQ ID NO: 355 - DNA, 20 bp, synthetic construct
  misc_feature 1..20: note = Artificial polynucleotide
  source 1..20: mol_type = other DNA
ttggactgctaacaccatag

SEQ ID NO: 356 - DNA, 20 bp, synthetic construct
  misc_feature 1..20: note = Artificial polynucleotide
  source 1..20: mol_type = other DNA
tttcagaggcatcaactaag

SEQ ID NO: 357 - DNA, 20 bp, synthetic construct
  misc_feature 1..20: note = Artificial polynucleotide
  source 1..20: mol_type = other DNA
tttcatatagggttggaacc

SEQ ID NO: 358 - DNA, 20 bp, synthetic construct
  misc_feature 1..20: note = Artificial polynucleotide
  source 1..20: mol_type = other DNA
tttgcctgtactctactaga

SEQ ID NO: 359 - DNA, 20 bp, synthetic construct
  misc_feature 1..20: note = Artificial polynucleotide
  source 1..20: mol_type = other DNA
aaaatgaggtgctctttact

SEQ ID NO: 360 - DNA, 20 bp, synthetic construct
  misc_feature 1..20: note = Artificial polynucleotide
  source 1..20: mol_type = other DNA
aaacccctgatccccctaca

SEQ ID NO: 361 - DNA, 20 bp, synthetic construct
  misc_feature 1..20: note = Artificial polynucleotide
  source 1..20: mol_type = other DNA
aaacggctgagagaccacag

SEQ ID NO: 362 - DNA, 20 bp, synthetic construct
  misc_feature 1..20: note = Artificial polynucleotide
  source 1..20: mol_type = other DNA
aaagacaatgacaagggttg

SEQ ID NO: 363 - DNA, 20 bp, synthetic construct
  misc_feature 1..20: note = Artificial polynucleotide
  source 1..20: mol_type = other DNA
aacaaatggaagacaggagg

SEQ ID NO: 364 - DNA, 20 bp, synthetic construct
  misc_feature 1..20: note = Artificial polynucleotide
  source 1..20: mol_type = other DNA
aacaggtcctagtataagct

SEQ ID NO: 365 - DNA, 20 bp, synthetic construct
  misc_feature 1..20: note = Artificial polynucleotide
  source 1..20: mol_type = other DNA
aagactcccttgagcccggg

SEQ ID NO: 366 - DNA, 20 bp, synthetic construct
  misc_feature 1..20: note = Artificial polynucleotide
  source 1..20: mol_type = other DNA
aagttcgcggggaatgaaca

SEQ ID NO: 367 - DNA, 20 bp, synthetic construct
  misc_feature 1..20: note = Artificial polynucleotide
  source 1..20: mol_type = other DNA
aatatcggcaaccctctctt

SEQ ID NO: 368 - DNA, 20 bp, synthetic construct
  misc_feature 1..20: note = Artificial polynucleotide
  source 1..20: mol_type = other DNA
aatccgtgtaaccttgaatt

SEQ ID NO: 369 - DNA, 20 bp, synthetic construct
  misc_feature 1..20: note = Artificial polynucleotide
  source 1..20: mol_type = other DNA
aatgacaagggttgtggagg

SEQ ID NO: 370 - DNA, 20 bp, synthetic construct
  misc_feature 1..20: note = Artificial polynucleotide
  source 1..20: mol_type = other DNA
aatgtttccagagtagttca

SEQ ID NO: 371 - DNA, 20 bp, synthetic construct
  misc_feature 1..20: note = Artificial polynucleotide
  source 1..20: mol_type = other DNA
acatctagggatgtgagtta

SEQ ID NO: 372 - DNA, 20 bp, synthetic construct
  misc_feature 1..20: note = Artificial polynucleotide
  source 1..20: mol_type = other DNA
acagagtctactatactctt

SEQ ID NO: 373 - DNA, 20 bp, synthetic construct
  misc_feature 1..20: note = Artificial polynucleotide
  source 1..20: mol_type = other DNA
accaatgggaaaagggtaca

SEQ ID NO: 374 - DNA, 20 bp, synthetic construct
  misc_feature 1..20: note = Artificial polynucleotide
  source 1..20: mol_type = other DNA
accctcccttcttcgataat

SEQ ID NO: 375 - DNA, 20 bp, synthetic construct
  misc_feature 1..20: note = Artificial polynucleotide
  source 1..20: mol_type = other DNA
acctgtgcccactgacccac

SEQ ID NO: 376 - DNA, 20 bp, synthetic construct
  misc_feature 1..20: note = Artificial polynucleotide
  source 1..20: mol_type = other DNA
actacactagaaaccaccta

SEQ ID NO: 377 - DNA, 20 bp, synthetic construct
  misc_feature 1..20: note = Artificial polynucleotide
  source 1..20: mol_type = other DNA
agactctgtggggtatgatg

SEQ ID NO: 378 - DNA, 20 bp, synthetic construct
  misc_feature 1..20: note = Artificial polynucleotide
  source 1..20: mol_type = other DNA
agactgttggtcggaagtgt

SEQ ID NO: 379 - DNA, 20 bp, synthetic construct
  misc_feature 1..20: note = Artificial polynucleotide
  source 1..20: mol_type = other DNA
agagcctgagtccaaaggca

SEQ ID NO: 380 - DNA, 20 bp, synthetic construct
  misc_feature 1..20: note = Artificial polynucleotide
  source 1..20: mol_type = other DNA
agaggtatgaaacacatcta

SEQ ID NO: 381 - DNA, 20 bp, synthetic construct
  misc_feature 1..20: note = Artificial polynucleotide
  source 1..20: mol_type = other DNA
agataactgtaaggactgtg

SEQ ID NO: 382 - DNA, 20 bp, synthetic construct
  misc_feature 1..20: note = Artificial polynucleotide
  source 1..20: mol_type = other DNA
aggtaatgcatcctgaggac

SEQ ID NO: 383 - DNA, 20 bp, synthetic construct
  misc_feature 1..20: note = Artificial polynucleotide
  source 1..20: mol_type = other DNA
agtctcagtcccaagcagct

SEQ ID NO: 384 - DNA, 20 bp, synthetic construct
  misc_feature 1..20: note = Artificial polynucleotide
  source 1..20: mol_type = other DNA
agtgaaaggataaccagaat

SEQ ID NO: 385 - DNA, 20 bp, synthetic construct
  misc_feature 1..20: note = Artificial polynucleotide
  source 1..20: mol_type = other DNA
agtgaccgacacacccacct

SEQ ID NO: 386 - DNA, 20 bp, synthetic construct
  misc_feature 1..20: note = Artificial polynucleotide
  source 1..20: mol_type = other DNA
agttcgcggggaatgaacaa

SEQ ID NO: 387 - DNA, 20 bp, synthetic construct
  misc_feature 1..20: note = Artificial polynucleotide
  source 1..20: mol_type = other DNA
atacccaagcttgaactccc

SEQ ID NO: 388 - DNA, 20 bp, synthetic construct
  misc_feature 1..20: note = Artificial polynucleotide
  source 1..20: mol_type = other DNA
atcacgaacctcctgatctc

SEQ ID NO: 389 - DNA, 20 bp, synthetic construct
  misc_feature 1..20: note = Artificial polynucleotide
  source 1..20: mol_type = other DNA
atgaagtcccacggagtcaa

SEQ ID NO: 390 - DNA, 20 bp, synthetic construct
  misc_feature 1..20: note = Artificial polynucleotide
  source 1..20: mol_type = other DNA
atgttaaacagagaagaggc

SEQ ID NO: 391 - DNA, 20 bp, synthetic construct
  misc_feature 1..20: note = Artificial polynucleotide
  source 1..20: mol_type = other DNA
attgcaggccctgctcccga

SEQ ID NO: 392 - DNA, 20 bp, synthetic construct
  misc_feature 1..20: note = Artificial polynucleotide
  source 1..20: mol_type = other DNA
caaattaactataatctcaa

SEQ ID NO: 393 - DNA, 20 bp, synthetic construct
  misc_feature 1..20: note = Artificial polynucleotide
  source 1..20: mol_type = other DNA
cacacctacaataccagctg

SEQ ID NO: 394 - DNA, 20 bp, synthetic construct
  misc_feature 1..20: note = Artificial polynucleotide
  source 1..20: mol_type = other DNA
cacagccaatggcaccatct

SEQ ID NO: 395 - DNA, 20 bp, synthetic construct
  misc_feature 1..20: note = Artificial polynucleotide
  source 1..20: mol_type = other DNA
caccacaaacactgccttcg

SEQ ID NO: 396 - DNA, 20 bp, synthetic construct
  misc_feature 1..20: note = Artificial polynucleotide
  source 1..20: mol_type = other DNA
caggtagacaacaccacgcc

SEQ ID NO: 397 - DNA, 20 bp, synthetic construct
  misc_feature 1..20: note = Artificial polynucleotide
  source 1..20: mol_type = other DNA
caggtgcgtgccctcacacc

SEQ ID NO: 398 - DNA, 20 bp, synthetic construct
  misc_feature 1..20: note = Artificial polynucleotide
  source 1..20: mol_type = other DNA
catgccaaaaagagggaggt

SEQ ID NO: 399 - DNA, 20 bp, synthetic construct
  misc_feature 1..20: note = Artificial polynucleotide
  source 1..20: mol_type = other DNA
catgtccgggcatgcaacaa

SEQ ID NO: 400 - DNA, 20 bp, synthetic construct
  misc_feature 1..20: note = Artificial polynucleotide
  source 1..20: mol_type = other DNA
cattgaggggaatgttctgg

SEQ ID NO: 401 - DNA, 20 bp, synthetic construct
  misc_feature 1..20: note = Artificial polynucleotide
  source 1..20: mol_type = other DNA
ccacaagcttagcggtccag

SEQ ID NO: 402 - DNA, 20 bp, synthetic construct
  misc_feature 1..20: note = Artificial polynucleotide
  source 1..20: mol_type = other DNA
ccacaatgagatgccacttg

SEQ ID NO: 403 - DNA, 20 bp, synthetic construct
  misc_feature 1..20: note = Artificial polynucleotide
  source 1..20: mol_type = other DNA
cccacttaggtgccagggaa

SEQ ID NO: 404 - DNA, 20 bp, synthetic construct
  misc_feature 1..20: note = Artificial polynucleotide
  source 1..20: mol_type = other DNA
ccccaagtggcatctcattg

SEQ ID NO: 405 - DNA, 20 bp, synthetic construct
  misc_feature 1..20: note = Artificial polynucleotide
  source 1..20: mol_type = other DNA
cccctccatcatgcctttgt

SEQ ID NO: 406 - DNA, 20 bp, synthetic construct
  misc_feature 1..20: note = Artificial polynucleotide
  source 1..20: mol_type = other DNA
cccttccacttcagcctccc

SEQ ID NO: 407 - DNA, 20 bp, synthetic construct
  misc_feature 1..20: note = Artificial polynucleotide
  source 1..20: mol_type = other DNA
ccgtacccccataccaaaat

SEQ ID NO: 408 - DNA, 20 bp, synthetic construct
  misc_feature 1..20: note = Artificial polynucleotide
  source 1..20: mol_type = other DNA
cctcagaatctatagactgt

SEQ ID NO: 409 - DNA, 20 bp, synthetic construct
  misc_feature 1..20: note = Artificial polynucleotide
  source 1..20: mol_type = other DNA
cctgctactgtggcatgtcc

SEQ ID NO: 410 - DNA, 20 bp, synthetic construct
  misc_feature 1..20: note = Artificial polynucleotide
  source 1..20: mol_type = other DNA
ctaaagactcccttgagccc

SEQ ID NO: 411 - DNA, 20 bp, synthetic construct
  misc_feature 1..20: note = Artificial polynucleotide
  source 1..20: mol_type = other DNA
ctagaaaccacctaagggta

SEQ ID NO: 412 - DNA, 20 bp, synthetic construct
  misc_feature 1..20: note = Artificial polynucleotide
  source 1..20: mol_type = other DNA
ctcaagcactgactgagctt

SEQ ID NO: 413 - DNA, 20 bp, synthetic construct
  misc_feature 1..20: note = Artificial polynucleotide
  source 1..20: mol_type = other DNA
ctgcattgaggggaatgttc

SEQ ID NO: 414 - DNA, 20 bp, synthetic construct
  misc_feature 1..20: note = Artificial polynucleotide
  source 1..20: mol_type = other DNA
cttgaaataatggccaggtg

SEQ ID NO: 415 - DNA, 20 bp, synthetic construct
  misc_feature 1..20: note = Artificial polynucleotide
  source 1..20: mol_type = other DNA
gaaacccctgatccccctac

SEQ ID NO: 416 - DNA, 20 bp, synthetic construct
  misc_feature 1..20: note = Artificial polynucleotide
  source 1..20: mol_type = other DNA
gacaatgacaagggttgtgg

SEQ ID NO: 417 - DNA, 20 bp, synthetic construct
  misc_feature 1..20: note = Artificial polynucleotide
  source 1..20: mol_type = other DNA
gacgttgtgaggctgagact

SEQ ID NO: 418 - DNA, 20 bp, synthetic construct
  misc_feature 1..20: note = Artificial polynucleotide
  source 1..20: mol_type = other DNA
gagaaaggcatgcatgctat

SEQ ID NO: 419 - DNA, 20 bp, synthetic construct
  misc_feature 1..20: note = Artificial polynucleotide
  source 1..20: mol_type = other DNA
gagatagggttttcaccacg

SEQ ID NO: 420 - DNA, 20 bp, synthetic construct
  misc_feature 1..20: note = Artificial polynucleotide
  source 1..20: mol_type = other DNA
gagcaatcctgcagcaacaa

SEQ ID NO: 421 - DNA, 20 bp, synthetic construct
  misc_feature 1..20: note = Artificial polynucleotide
  source 1..20: mol_type = other DNA
gaggtgtgcaacaccacatt

SEQ ID NO: 422 - DNA, 20 bp, synthetic construct
  misc_feature 1..20: note = Artificial polynucleotide
  source 1..20: mol_type = other DNA
gagtgttgggagagaatttg

SEQ ID NO: 423 - DNA, 20 bp, synthetic construct
  misc_feature 1..20: note = Artificial polynucleotide
  source 1..20: mol_type = other DNA
gagttggtgtctgcattgag

SEQ ID NO: 424 - DNA, 20 bp, synthetic construct
  misc_feature 1..20: note = Artificial polynucleotide
  source 1..20: mol_type = other DNA
gatcagtgctacattatggt

SEQ ID NO: 425 - DNA, 20 bp, synthetic construct
  misc_feature 1..20: note = Artificial polynucleotide
  source 1..20: mol_type = other DNA
gcaacctattcctaagggat

SEQ ID NO: 426 - DNA, 20 bp, synthetic construct
  misc_feature 1..20: note = Artificial polynucleotide
  source 1..20: mol_type = other DNA
gcactttgggaaagaaacca

SEQ ID NO: 427 - DNA, 20 bp, synthetic construct
  misc_feature 1..20: note = Artificial polynucleotide
  source 1..20: mol_type = other DNA
gcctgtactaacaggcactt

SEQ ID NO: 428 - DNA, 20 bp, synthetic construct
  misc_feature 1..20: note = Artificial polynucleotide
  source 1..20: mol_type = other DNA
gcgaggctgtgggggttgaa

SEQ ID NO: 429 - DNA, 20 bp, synthetic construct
  misc_feature 1..20: note = Artificial polynucleotide
  source 1..20: mol_type = other DNA
gctattcaatcctagttatg

SEQ ID NO: 430 - DNA, 20 bp, synthetic construct
  misc_feature 1..20: note = Artificial polynucleotide
  source 1..20: mol_type = other DNA
ggactagggattagagtaac

SEQ ID NO: 431 - DNA, 20 bp, synthetic construct
  misc_feature 1..20: note = Artificial polynucleotide
  source 1..20: mol_type = other DNA
ggaggcagaggtcgcggtga

SEQ ID NO: 432 - DNA, 20 bp, synthetic construct
  misc_feature 1..20: note = Artificial polynucleotide
  source 1..20: mol_type = other DNA
ggagggatgcactgatacgg

SEQ ID NO: 433 - DNA, 20 bp, synthetic construct
  misc_feature 1..20: note = Artificial polynucleotide
  source 1..20: mol_type = other DNA
ggagttggtgtctgcattga

SEQ ID NO: 434 - DNA, 20 bp, synthetic construct
  misc_feature 1..20: note = Artificial polynucleotide
  source 1..20: mol_type = other DNA
ggattcagtcaaggtgtcag

SEQ ID NO: 435 - DNA, 20 bp, synthetic construct
  misc_feature 1..20: note = Artificial polynucleotide
  source 1..20: mol_type = other DNA
gggaaagaaaccaaggcggg

SEQ ID NO: 436 - DNA, 20 bp, synthetic construct
  misc_feature 1..20: note = Artificial polynucleotide
  source 1..20: mol_type = other DNA
gggtagggggtcggaaagtg

SEQ ID NO: 437 - DNA, 20 bp, synthetic construct
  misc_feature 1..20: note = Artificial polynucleotide
  source 1..20: mol_type = other DNA
ggtgatatacgctaatgtgc

SEQ ID NO: 438 - DNA, 20 bp, synthetic construct
  misc_feature 1..20: note = Artificial polynucleotide
  source 1..20: mol_type = other DNA
ggttttgagcaagccctcct

SEQ ID NO: 439 - DNA, 20 bp, synthetic construct
  misc_feature 1..20: note = Artificial polynucleotide
  source 1..20: mol_type = other DNA
gtaggtcatatggtaacttc

SEQ ID NO: 440 - DNA, 20 bp, synthetic construct
  misc_feature 1..20: note = Artificial polynucleotide
  source 1..20: mol_type = other DNA
gtcctccaaacacatacaag

SEQ ID NO: 441 - DNA, 20 bp, synthetic construct
  misc_feature 1..20: note = Artificial polynucleotide
  source 1..20: mol_type = other DNA
gtgaaacagcacagccacag

SEQ ID NO: 442 - DNA, 20 bp, synthetic construct
  misc_feature 1..20: note = Artificial polynucleotide
  source 1..20: mol_type = other DNA
gtgataccactgcatgtcat

SEQ ID NO: 443 - DNA, 20 bp, synthetic construct
  misc_feature 1..20: note = Artificial polynucleotide
  source 1..20: mol_type = other DNA
gtgggacttcatcgccccca

SEQ ID NO: 444 - DNA, 20 bp, synthetic construct
  misc_feature 1..20: note = Artificial polynucleotide
  source 1..20: mol_type = other DNA
gttttgctccatcacccagg

SEQ ID NO: 445 - DNA, 20 bp, synthetic construct
  misc_feature 1..20: note = Artificial polynucleotide
  source 1..20: mol_type = other DNA
tacaatgttaaacagagaag

SEQ ID NO: 446 - DNA, 20 bp, synthetic construct
  misc_feature 1..20: note = Artificial polynucleotide
  source 1..20: mol_type = other DNA
tacctcaagcctgtactaac

SEQ ID NO: 447 - DNA, 20 bp, synthetic construct
  misc_feature 1..20: note = Artificial polynucleotide
  source 1..20: mol_type = other DNA
tactgatcagtgctacatta

SEQ ID NO: 448 - DNA, 20 bp, synthetic construct
  misc_feature 1..20: note = Artificial polynucleotide
  source 1..20: mol_type = other DNA
tagcaacctatgacatgcag

SEQ ID NO: 449 - DNA, 20 bp, synthetic construct
  misc_feature 1..20: note = Artificial polynucleotide
  source 1..20: mol_type = other DNA
taggatcacacctgagttct

SEQ ID NO: 450 - DNA, 20 bp, synthetic construct
  misc_feature 1..20: note = Artificial polynucleotide
  source 1..20: mol_type = other DNA
tcaaaagagcctgagtccaa

SEQ ID NO: 451 - DNA, 20 bp, synthetic construct
  misc_feature 1..20: note = Artificial polynucleotide
  source 1..20: mol_type = other DNA
tcctacaaaggcatgatgga

SEQ ID NO: 452 - DNA, 20 bp, synthetic construct
  misc_feature 1..20: note = Artificial polynucleotide
  source 1..20: mol_type = other DNA
tgatcagtgctacattatgg

SEQ ID NO: 453 - DNA, 20 bp, synthetic construct
  misc_feature 1..20: note = Artificial polynucleotide
  source 1..20: mol_type = other DNA
tgctgactgtcatgcgttgt

SEQ ID NO: 454 - DNA, 20 bp, synthetic construct
  misc_feature 1..20: note = Artificial polynucleotide
  source 1..20: mol_type = other DNA
tggcagtcaagataactgta

SEQ ID NO: 455 - DNA, 20 bp, synthetic construct
  misc_feature 1..20: note = Artificial polynucleotide
  source 1..20: mol_type = other DNA
tgggtagggggtcggaaagt

SEQ ID NO: 456 - DNA, 20 bp, synthetic construct
  misc_feature 1..20: note = Artificial polynucleotide
  source 1..20: mol_type = other DNA
tggtattagtcaagatagtg

SEQ ID NO: 457 - DNA, 20 bp, synthetic construct
  misc_feature 1..20: note = Artificial polynucleotide
  source 1..20: mol_type = other DNA
tgtacctatcccttaggaat

SEQ ID NO: 458 - DNA, 20 bp, synthetic construct
  misc_feature 1..20: note = Artificial polynucleotide
  source 1..20: mol_type = other DNA
tgttaaacagagaagaggct

SEQ ID NO: 459 - DNA, 20 bp, synthetic construct
  misc_feature 1..20: note = Artificial polynucleotide
  source 1..20: mol_type = other DNA
ttcctacaaaggcatgatgg

SEQ ID NO: 460 - DNA, 20 bp, synthetic construct
  misc_feature 1..20: note = Artificial polynucleotide
  source 1..20: mol_type = other DNA
ttgagtgttcaatctccctt

SEQ ID NO: 461 - DNA, 20 bp, synthetic construct
  misc_feature 1..20: note = Artificial polynucleotide
  source 1..20: mol_type = other DNA
ttgggagagaatttgaggca

SEQ ID NO: 462 - DNA, 20 bp, synthetic construct
  misc_feature 1..20: note = Artificial polynucleotide
  source 1..20: mol_type = other DNA
tttaggtctaagatccacct

SEQ ID NO: 463 - DNA, 20 bp, synthetic construct
  misc_feature 1..20: note = Artificial polynucleotide
  source 1..20: mol_type = other DNA
tttgggaaagaaaccaaggc

SEQ ID NO: 464 - DNA, 20 bp, synthetic construct
  misc_feature 1..20: note = Artificial polynucleotide
  source 1..20: mol_type = other DNA
acaccaatctctttagtgct

SEQ ID NO: 465 - DNA, 20 bp, synthetic construct
  misc_feature 1..20: note = Artificial polynucleotide
  source 1..20: mol_type = other DNA
actacagaggcacgcatcca

SEQ ID NO: 466 - DNA, 20 bp, synthetic construct
  misc_feature 1..20: note = Artificial polynucleotide
  source 1..20: mol_type = other DNA
agtatataggtggccttaca

SEQ ID NO: 467 - DNA, 20 bp, synthetic construct
  misc_feature 1..20: note = Artificial polynucleotide
  source 1..20: mol_type = other DNA
atcatgtgcagggcttttac

SEQ ID NO: 468 - DNA, 20 bp, synthetic construct
  misc_feature 1..20: note = Artificial polynucleotide
  source 1..20: mol_type = other DNA
caattgttaagcagaatctc

SEQ ID NO: 469 - DNA, 20 bp, synthetic construct
  misc_feature 1..20: note = Artificial polynucleotide
  source 1..20: mol_type = other DNA
cacaatgctagcaggagttg

SEQ ID NO: 470 - DNA, 20 bp, synthetic construct
  misc_feature 1..20: note = Artificial polynucleotide
  source 1..20: mol_type = other DNA
cactcaacaatttctatcct

SEQ ID NO: 471 - DNA, 20 bp, synthetic construct
  misc_feature 1..20: note = Artificial polynucleotide
  source 1..20: mol_type = other DNA
caggtaaagtactttggttg

SEQ ID NO: 472 - DNA, 20 bp, synthetic construct
  misc_feature 1..20: note = Artificial polynucleotide
  source 1..20: mol_type = other DNA
caggtaccaagaggcagact

SEQ ID NO: 473 - DNA, 20 bp, synthetic construct
  misc_feature 1..20: note = Artificial polynucleotide
  source 1..20: mol_type = other DNA
cagtccagacttcttggcgt

SEQ ID NO: 474 - DNA, 20 bp, synthetic construct
  misc_feature 1..20: note = Artificial polynucleotide
  source 1..20: mol_type = other DNA
ccaagggactggcggagccc

SEQ ID NO: 475 - DNA, 20 bp, synthetic construct
  misc_feature 1..20: note = Artificial polynucleotide
  source 1..20: mol_type = other DNA
cccgggcgccgaggaccctg

SEQ ID NO: 476 - DNA, 20 bp, synthetic construct
  misc_feature 1..20: note = Artificial polynucleotide
  source 1..20: mol_type = other DNA
cgaagaaattaacagaagag

SEQ ID NO: 477 - DNA, 20 bp, synthetic construct
  misc_feature 1..20: note = Artificial polynucleotide
  source 1..20: mol_type = other DNA
cggcattctggggatgaatc

SEQ ID NO: 478 - DNA, 20 bp, synthetic construct
  misc_feature 1..20: note = Artificial polynucleotide
  source 1..20: mol_type = other DNA
cggccgcggcgcaagacggg

SEQ ID NO: 479 - DNA, 20 bp, synthetic construct
  misc_feature 1..20: note = Artificial polynucleotide
  source 1..20: mol_type = other DNA
ctgccacgctgtgactcaga

SEQ ID NO: 480 - DNA, 20 bp, synthetic construct
  misc_feature 1..20: note = Artificial polynucleotide
  source 1..20: mol_type = other DNA
ctgtgactcagacggcattc

SEQ ID NO: 481 - DNA, 20 bp, synthetic construct
  misc_feature 1..20: note = Artificial polynucleotide
  source 1..20: mol_type = other DNA
gaactgtatccaccctcagc

SEQ ID NO: 482 - DNA, 20 bp, synthetic construct
  misc_feature 1..20: note = Artificial polynucleotide
  source 1..20: mol_type = other DNA
gaagtagttccagagcagta

SEQ ID NO: 483 - DNA, 20 bp, synthetic construct
  misc_feature 1..20: note = Artificial polynucleotide
  source 1..20: mol_type = other DNA
gatgtgatctttgggccctt

SEQ ID NO: 484 - DNA, 20 bp, synthetic construct
  misc_feature 1..20: note = Artificial polynucleotide
  source 1..20: mol_type = other DNA
gcacaaccacttaaaccccc

SEQ ID NO: 485 - DNA, 20 bp, synthetic construct
  misc_feature 1..20: note = Artificial polynucleotide
  source 1..20: mol_type = other DNA
gcagtatgggaagaaatcac

SEQ ID NO: 486 - DNA, 20 bp, synthetic construct
  misc_feature 1..20: note = Artificial polynucleotide
  source 1..20: mol_type = other DNA
gccttgatatgtaatgagca

SEQ ID NO: 487 - DNA, 20 bp, synthetic construct
  misc_feature 1..20: note = Artificial polynucleotide
  source 1..20: mol_type = other DNA
ggataaaatacttttggaag

SEQ ID NO: 488 - DNA, 20 bp, synthetic construct
  misc_feature 1..20: note = Artificial polynucleotide
  source 1..20: mol_type = other DNA
ggcagggcgccccgggaact

SEQ ID NO: 489 - DNA, 20 bp, synthetic construct
  misc_feature 1..20: note = Artificial polynucleotide
  source 1..20: mol_type = other DNA
gtgacattcacaaccactcc

SEQ ID NO: 490 - DNA, 20 bp, synthetic construct
  misc_feature 1..20: note = Artificial polynucleotide
  source 1..20: mol_type = other DNA
gtgactcagacggcattctg

SEQ ID NO: 491 - DNA, 20 bp, synthetic construct
  misc_feature 1..20: note = Artificial polynucleotide
  source 1..20: mol_type = other DNA
gttccataaccaattcaaac

SEQ ID NO: 492 - DNA, 20 bp, synthetic construct
  misc_feature 1..20: note = Artificial polynucleotide
  source 1..20: mol_type = other DNA
gttgggatatggttgccatt

SEQ ID NO: 493 - DNA, 20 bp, synthetic construct
  misc_feature 1..20: note = Artificial polynucleotide
  source 1..20: mol_type = other DNA
taccgtatgaagggatccac

SEQ ID NO: 494 - DNA, 20 bp, synthetic construct
  misc_feature 1..20: note = Artificial polynucleotide
  source 1..20: mol_type = other DNA
tacctgtgtagtgcacatgg

SEQ ID NO: 495 - DNA, 20 bp, synthetic construct
  misc_feature 1..20: note = Artificial polynucleotide
  source 1..20: mol_type = other DNA
tactaccccacggtttgtag

SEQ ID NO: 496 - DNA, 20 bp, synthetic construct
  misc_feature 1..20: note = Artificial polynucleotide
  source 1..20: mol_type = other DNA
tagtaacatactccgcgcat

SEQ ID NO: 497 - DNA, 20 bp, synthetic construct
  misc_feature 1..20: note = Artificial polynucleotide
  source 1..20: mol_type = other DNA
tcactcatgccaaaatctaa

SEQ ID NO: 498 - DNA, 20 bp, synthetic construct
  misc_feature 1..20: note = Artificial polynucleotide
  source 1..20: mol_type = other DNA
tcatgacccgggggtttaag

SEQ ID NO: 499 - DNA, 20 bp, synthetic construct
  misc_feature 1..20: note = Artificial polynucleotide
  source 1..20: mol_type = other DNA
tccatatattcctgcagggt

SEQ ID NO: 500 - DNA, 20 bp, synthetic construct
  misc_feature 1..20: note = Artificial polynucleotide
  source 1..20: mol_type = other DNA
tcgagcctgcgctccctccg

SEQ ID NO: 501 - DNA, 20 bp, synthetic construct
  misc_feature 1..20: note = Artificial polynucleotide
  source 1..20: mol_type = other DNA
tcggcgcgcctgcacagcgc

SEQ ID NO: 502 - DNA, 20 bp, synthetic construct
  misc_feature 1..20: note = Artificial polynucleotide
  source 1..20: mol_type = other DNA
tctagcagaaacgcaagttc

SEQ ID NO: 503 - DNA, 20 bp, synthetic construct
  misc_feature 1..20: note = Artificial polynucleotide
  source 1..20: mol_type = other DNA
tctggactatggctctacag

SEQ ID NO: 504 - DNA, 20 bp, synthetic construct
  misc_feature 1..20: note = Artificial polynucleotide
  source 1..20: mol_type = other DNA
tgtgactcagacggcattct

SEQ ID NO: 505 - DNA, 20 bp, synthetic construct
  misc_feature 1..20: note = Artificial polynucleotide
  source 1..20: mol_type = other DNA
ttacctttaactcatgtaac

SEQ ID NO: 506 - DNA, 20 bp, synthetic construct
  misc_feature 1..20: note = Artificial polynucleotide
  source 1..20: mol_type = other DNA
ttgtcacttggtgataccac

SEQ ID NO: 507 - DNA, 20 bp, synthetic construct
  misc_feature 1..20: note = Artificial polynucleotide
  source 1..20: mol_type = other DNA
acactctctagcacagtata

SEQ ID NO: 508 - DNA, 20 bp, synthetic construct
  misc_feature 1..20: note = Artificial polynucleotide
  source 1..20: mol_type = other DNA
atacatctctgccttttaag

SEQ ID NO: 509 - DNA, 20 bp, synthetic construct
  misc_feature 1..20: note = Artificial polynucleotide
  source 1..20: mol_type = other DNA
atattatattcatgtagtgc

SEQ ID NO: 510 - DNA, 20 bp, synthetic construct
  misc_feature 1..20: note = Artificial polynucleotide
  source 1..20: mol_type = other DNA
cagctgaaggtacatcacat

SEQ ID NO: 511 - DNA, 20 bp, synthetic construct
  misc_feature 1..20: note = Artificial polynucleotide
  source 1..20: mol_type = other DNA
cttgtttttcattatgaaac

SEQ ID NO: 512 - DNA, 20 bp, synthetic construct
  misc_feature 1..20: note = Artificial polynucleotide
  source 1..20: mol_type = other DNA
gagataatacttaatcgctg

SEQ ID NO: 513 - DNA, 20 bp, synthetic construct
  misc_feature 1..20: note = Artificial polynucleotide
  source 1..20: mol_type = other DNA
gagcacattttctatgctct

SEQ ID NO: 514 - DNA, 20 bp, synthetic construct
  misc_feature 1..20: note = Artificial polynucleotide
  source 1..20: mol_type = other DNA
tactgattttttctgcttgg

SEQ ID NO: 515 - DNA, 20 bp, synthetic construct
  misc_feature 1..20: note = Artificial polynucleotide
  source 1..20: mol_type = other DNA
tggggcactgcagcacatgt

SEQ ID NO: 516 - DNA, 20 bp, synthetic construct
  misc_feature 1..20: note = Artificial polynucleotide
  source 1..20: mol_type = other DNA
tttcggtacttaacagatgt

SEQ ID NO: 517 - DNA, 20 bp, synthetic construct
  misc_feature 1..20: note = Artificial polynucleotide
  source 1..20: mol_type = other DNA
gcctacagggtatctctcct

SEQ ID NO: 518 - DNA, 20 bp, synthetic construct
  misc_feature 1..20: note = Artificial polynucleotide
  source 1..20: mol_type = other DNA
atcatacaggagtgcctaca

SEQ ID NO: 519 - DNA, 20 bp, synthetic construct
  misc_feature 1..20: note = Artificial polynucleotide
  source 1..20: mol_type = other DNA
tgagctcagagccttctgtg

SEQ ID NO: 520 - DNA, 20 bp, synthetic construct
  misc_feature 1..20: note = Artificial polynucleotide
  source 1..20: mol_type = other DNA
ccatagctgaggcctttatt

SEQ ID NO: 521 - DNA, 20 bp, synthetic construct
  misc_feature 1..20: note = Artificial polynucleotide
  source 1..20: mol_type = other DNA
aaaaccaggcaaccataatg

SEQ ID NO: 522 - DNA, 20 bp, synthetic construct
  misc_feature 1..20: note = Artificial polynucleotide
  source 1..20: mol_type = other DNA
tcctgcgccgacctcgaatg

SEQ ID NO: 523 - DNA, 20 bp, synthetic construct
  misc_feature 1..20: note = Artificial polynucleotide
  source 1..20: mol_type = other DNA
cagcaggaggaccgcattcg

SEQ ID NO: 524 - DNA, 20 bp, synthetic construct
  misc_feature 1..20: note = Artificial polynucleotide
  source 1..20: mol_type = other DNA
gagccttctgtgtggtttgc

SEQ ID NO: 525 - DNA, 20 bp, synthetic construct
  misc_feature 1..20: note = Artificial polynucleotide
  source 1..20: mol_type = other DNA
agccttctgtgtggtttgcg

SEQ ID NO: 526 - DNA, 20 bp, synthetic construct
  misc_feature 1..20: note = Artificial polynucleotide
  source 1..20: mol_type = other DNA
gccttctgtgtggtttgcgg

SEQ ID NO: 527 - DNA, 20 bp, synthetic construct
  misc_feature 1..20: note = Artificial polynucleotide
  source 1..20: mol_type = other DNA
gcccccgcaaaccacacaga

SEQ ID NO: 528 - DNA, 20 bp, synthetic construct
  misc_feature 1..20: note = Artificial polynucleotide
  source 1..20: mol_type = other DNA
aagcaatatgaaatgttacc

SEQ ID NO: 529 - DNA, 20 bp, synthetic construct
  misc_feature 1..20: note = Artificial polynucleotide
  source 1..20: mol_type = other DNA
tatgacgacactcatttgca

SEQ ID NO: 530 - DNA, 20 bp, synthetic construct
  misc_feature 1..20: note = Artificial polynucleotide
  source 1..20: mol_type = other DNA
gttgggctacctttatcctt

SEQ ID NO: 531 - DNA, 20 bp, synthetic construct
  misc_feature 1..20: note = Artificial polynucleotide
  source 1..20: mol_type = other DNA
gccatcttgcaacaatccca

SEQ ID NO: 532 - DNA, 20 bp, synthetic construct
  misc_feature 1..20: note = Artificial polynucleotide
  source 1..20: mol_type = other DNA
gttagtctatgcatgggtat

SEQ ID NO: 533 - DNA, 20 bp, synthetic construct
  misc_feature 1..20: note = Artificial polynucleotide
  source 1..20: mol_type = other DNA
tgatagagcagcgtggccca

SEQ ID NO: 534 - DNA, 20 bp, synthetic construct
  misc_feature 1..20: note = Artificial polynucleotide
  source 1..20: mol_type = other DNA
gctaagcagtggactaagga

SEQ ID NO: 535 - DNA, 20 bp, synthetic construct
  misc_feature 1..20: note = Artificial polynucleotide
  source 1..20: mol_type = other DNA
tcagatgttaaaggccaatg

SEQ ID NO: 536 - DNA, 20 bp, synthetic construct
  misc_feature 1..20: note = Artificial polynucleotide
  source 1..20: mol_type = other DNA
gctgcccttgggagcccaga

SEQ ID NO: 537 - DNA, 20 bp, synthetic construct
  misc_feature 1..20: note = Artificial polynucleotide
  source 1..20: mol_type = other DNA
ggcaagtttcaggcctggac

SEQ ID NO: 538 - DNA, 20 bp, synthetic construct
  misc_feature 1..20: note = Artificial polynucleotide
  source 1..20: mol_type = other DNA
gcaagtttcaggcctggact

SEQ ID NO: 539 - DNA, 20 bp, synthetic construct
  misc_feature 1..20: note = Artificial polynucleotide
  source 1..20: mol_type = other DNA
agtttcaggcctggactggg

SEQ ID NO: 540 - DNA, 20 bp, synthetic construct
  misc_feature 1..20: note = Artificial polynucleotide
  source 1..20: mol_type = other DNA
gctttccctgccctgtttgc

SEQ ID NO: 541 - DNA, 20 bp, synthetic construct
  misc_feature 1..20: note = Artificial polynucleotide
  source 1..20: mol_type = other DNA
accatgcagggactgggcat

SEQ ID NO: 542 - DNA, 20 bp, synthetic construct
  misc_feature 1..20: note = Artificial polynucleotide
  source 1..20: mol_type = other DNA
ccatgcagggactgggcatg

SEQ ID NO: 543 - DNA, 20 bp, synthetic construct
  misc_feature 1..20: note = Artificial polynucleotide
  source 1..20: mol_type = other DNA
gcatcactttctgagctgcc

SEQ ID NO: 544 - DNA, 20 bp, synthetic construct
  misc_feature 1..20: note = Artificial polynucleotide
  source 1..20: mol_type = other DNA
ggcagctcagaaagtgatgc

SEQ ID NO: 545 - DNA, 20 bp, synthetic construct
  misc_feature 1..20: note = Artificial polynucleotide
  source 1..20: mol_type = other DNA
gatgcaggggccgctctctg

SEQ ID NO: 546 - DNA, 20 bp, synthetic construct
  misc_feature 1..20: note = Artificial polynucleotide
  source 1..20: mol_type = other DNA
tcagaagacctcatggattg

SEQ ID NO: 547 - DNA, 20 bp, synthetic construct
  misc_feature 1..20: note = Artificial polynucleotide
  source 1..20: mol_type = other DNA
ggaccattagcattgccagg

SEQ ID NO: 548 - DNA, 20 bp, synthetic construct
  misc_feature 1..20: note = Artificial polynucleotide
  source 1..20: mol_type = other DNA
gaccattagcattgccagga

SEQ ID NO: 549 - DNA, 20 bp, synthetic construct
  misc_feature 1..20: note = Artificial polynucleotide
  source 1..20: mol_type = other DNA
accattagcattgccaggag

SEQ ID NO: 550 - DNA, 20 bp, synthetic construct
  misc_feature 1..20: note = Artificial polynucleotide
  source 1..20: mol_type = other DNA
atgtggtgcatctcgatgag

SEQ ID NO: 551 - DNA, 20 bp, synthetic construct
  misc_feature 1..20: note = Artificial polynucleotide
  source 1..20: mol_type = other DNA
cctcatcccctaccaccctt

SEQ ID NO: 552 - DNA, 20 bp, synthetic construct
  misc_feature 1..20: note = Artificial polynucleotide
  source 1..20: mol_type = other DNA
ctagggcctaagggtggtag

SEQ ID NO: 553 - DNA, 20 bp, synthetic construct
  misc_feature 1..20: note = Artificial polynucleotide
  source 1..20: mol_type = other DNA
actagggcctaagggtggta

SEQ ID NO: 554 - DNA, 20 bp, synthetic construct
  misc_feature 1..20: note = Artificial polynucleotide
  source 1..20: mol_type = other DNA
tgagtactagggcctaaggg

SEQ ID NO: 555 - DNA, 20 bp, synthetic construct
  misc_feature 1..20: note = Artificial polynucleotide
  source 1..20: mol_type = other DNA
atagtcaatgaaatctccca

SEQ ID NO: 556 - DNA, 20 bp, synthetic construct
  misc_feature 1..20: note = Artificial polynucleotide
  source 1..20: mol_type = other DNA
agagaaagacgagatggcac

SEQ ID NO: 557 - DNA, 20 bp, synthetic construct
  misc_feature 1..20: note = Artificial polynucleotide
  source 1..20: mol_type = other DNA
ataaagggcctgagcagggg

SEQ ID NO: 558 - DNA, 20 bp, synthetic construct
  misc_feature 1..20: note = Artificial polynucleotide
  source 1..20: mol_type = other DNA
ctaatttcctcattgaaggt

SEQ ID NO: 559 - DNA, 20 bp, synthetic construct
  misc_feature 1..20: note = Artificial polynucleotide
  source 1..20: mol_type = other DNA
aaaaaggctgcccgctgcgg

SEQ ID NO: 560 - DNA, 20 bp, synthetic construct
  misc_feature 1..20: note = Artificial polynucleotide
  source 1..20: mol_type = other DNA
atttagaagacgatgatgag

SEQ ID NO: 561 - DNA, 20 bp, synthetic construct
  misc_feature 1..20: note = Artificial polynucleotide
  source 1..20: mol_type = other DNA
tctgtattaataatgctgcc

SEQ ID NO: 562 - DNA, 20 bp, synthetic construct
  misc_feature 1..20: note = Artificial polynucleotide
  source 1..20: mol_type = other DNA
tttagacgctgatgtagctt

SEQ ID NO: 563 - DNA, 20 bp, synthetic construct
  misc_feature 1..20: note = Artificial polynucleotide
  source 1..20: mol_type = other DNA
agtccctaatatggctagtc

SEQ ID NO: 564 - DNA, 20 bp, synthetic construct
  misc_feature 1..20: note = Artificial polynucleotide
  source 1..20: mol_type = other DNA
cagccaggttactgattcat

SEQ ID NO: 565 - DNA, 20 bp, synthetic construct
  misc_feature 1..20: note = Artificial polynucleotide
  source 1..20: mol_type = other DNA
acccctatgaatcagtaacc

SEQ ID NO: 566 - DNA, 20 bp, synthetic construct
  misc_feature 1..20: note = Artificial polynucleotide
  source 1..20: mol_type = other DNA
actagtattcctgtagaaga

SEQ ID NO: 567 - DNA, 20 bp, synthetic construct
  misc_feature 1..20: note = Artificial polynucleotide
  source 1..20: mol_type = other DNA
gtaaggctgatttgggcaaa

SEQ ID NO: 568 - DNA, 20 bp, synthetic construct
  misc_feature 1..20: note = Artificial polynucleotide
  source 1..20: mol_type = other DNA
gaacctgaggttagcagcaa

SEQ ID NO: 569 - DNA, 20 bp, synthetic construct
  misc_feature 1..20: note = Artificial polynucleotide
  source 1..20: mol_type = other DNA
ttatgcaagcatgtgttttt

SEQ ID NO: 570 - DNA, 20 bp, synthetic construct
  misc_feature 1..20: note = Artificial polynucleotide
  source 1..20: mol_type = other DNA
caacagaattttgtcaaaat

SEQ ID NO: 571 - DNA, 20 bp, synthetic construct
  misc_feature 1..20: note = Artificial polynucleotide
  source 1..20: mol_type = other DNA
ggaccagtaaaataattatt

SEQ ID NO: 572 - DNA, 20 bp, synthetic construct
  misc_feature 1..20: note = Artificial polynucleotide
  source 1..20: mol_type = other DNA
gcatccttgcatagaggacc

SEQ ID NO: 573 - DNA, 20 bp, synthetic construct
  misc_feature 1..20: note = Artificial polynucleotide
  source 1..20: mol_type = other DNA
gatgacaggttggccattgg

SEQ ID NO: 574 - DNA, 20 bp, synthetic construct
  misc_feature 1..20: note = Artificial polynucleotide
  source 1..20: mol_type = other DNA
cattgacgtgggttgcacca

SEQ ID NO: 575 - DNA, 20 bp, synthetic construct
  misc_feature 1..20: note = Artificial polynucleotide
  source 1..20: mol_type = other DNA
gtacaaattgacgacacacc

SEQ ID NO: 576 - DNA, 20 bp, synthetic construct
  misc_feature 1..20: note = Artificial polynucleotide
  source 1..20: mol_type = other DNA
ggactctatttgtgaggcca

SEQ ID NO: 577 - DNA, 20 bp, synthetic construct
  misc_feature 1..20: note = Artificial polynucleotide
  source 1..20: mol_type = other DNA
acgtgcagcatatgtggcgt

SEQ ID NO: 578 - DNA, 20 bp, synthetic construct
  misc_feature 1..20: note = Artificial polynucleotide
  source 1..20: mol_type = other DNA
cagtgtttcatatctagact

SEQ ID NO: 579 - DNA, 20 bp, synthetic construct
  misc_feature 1..20: note = Artificial polynucleotide
  source 1..20: mol_type = other DNA
agtcggcctgccctgaaggg

SEQ ID NO: 580 - DNA, 20 bp, synthetic construct
  misc_feature 1..20: note = Artificial polynucleotide
  source 1..20: mol_type = other DNA
acgctcctggcagagggcta

SEQ ID NO: 581 - RNA, 20 nt, synthetic construct
  misc_feature 1..20: note = Synthetic polynucleotide
  source 1..20: mol_type = other RNA
acccacccagcaaccaccag

SEQ ID NO: 582 - RNA, 20 nt, synthetic construct
  misc_feature 1..20: note = Synthetic polynucleotide
  source 1..20: mol_type = other RNA
gacaatgacaagggttgtgg

SEQ ID NO: 583 - RNA, 20 nt, synthetic construct
  misc_feature 1..20: note = Synthetic polynucleotide
  source 1..20: mol_type = other RNA
tgcttgtttgccgcagtgca

SEQ ID NO: 584 - RNA, 20 nt, synthetic construct
  misc_feature 1..20: note = Synthetic polynucleotide
  source 1..20: mol_type = other RNA
ggttttgagcaagccctcct

SEQ ID NO: 585 - RNA, 20 nt, synthetic construct
  misc_feature 1..20: note = Synthetic polynucleotide
  source 1..20: mol_type = other RNA
acatcctctattctgatcat

SEQ ID NO: 586 - RNA, 20 nt, synthetic construct
  misc_feature 1..20: note = Synthetic polynucleotide
  source 1..20: mol_type = other RNA
tcgttgtgacactactgagt

SEQ ID NO: 587 - RNA, 20 nt, synthetic construct
  misc_feature 1..20: note = Synthetic polynucleotide
  source 1..20: mol_type = other RNA
ctgccacgctgtgactcaga

SEQ ID NO: 588 - RNA, 20 nt, synthetic construct
  misc_feature 1..20: note = Synthetic polynucleotide
  source 1..20: mol_type = other RNA
ggaaccagtcagaacaggtg

SEQ ID NO: 589 - RNA, 20 nt, synthetic construct
  misc_feature 1..20: note = Synthetic polynucleotide
  source 1..20: mol_type = other RNA
cagttcagggcatgagataa

SEQ ID NO: 590 - RNA, 20 nt, synthetic construct
  misc_feature 1..20: note = Synthetic polynucleotide
  source 1..20: mol_type = other RNA
aaaatcccaaaggcttcaga

SEQ ID NO: 591 - RNA, 20 nt, synthetic construct
  misc_feature 1..20: note = Synthetic polynucleotide
  source 1..20: mol_type = other RNA
aaagcatgcgctacaataac

SEQ ID NO: 592 - RNA, 20 nt, synthetic construct
  misc_feature 1..20: note = Synthetic polynucleotide
  source 1..20: mol_type = other RNA
aaagttataaatcacgttaa

SEQ ID NO: 593 - RNA, 20 nt, synthetic construct
  misc_feature 1..20: note = Synthetic polynucleotide
  source 1..20: mol_type = other RNA
aaatgcacttacccacgtat

SEQ ID NO: 594 - RNA, 20 nt, synthetic construct
  misc_feature 1..20: note = Synthetic polynucleotide
  source 1..20: mol_type = other RNA
aaatgttgtcatccatatcc

SEQ ID NO: 595 - RNA, 20 nt, synthetic construct
  misc_feature 1..20: note = Synthetic polynucleotide
  source 1..20: mol_type = other RNA
aacctgaggttagcagcaag

SEQ ID NO: 596 - RNA, 20 nt, synthetic construct
  misc_feature 1..20: note = Synthetic polynucleotide
  source 1..20: mol_type = other RNA
aactatatgctacctggata

SEQ ID NO: 597 - RNA, 20 nt, synthetic construct
  misc_feature 1..20: note = Synthetic polynucleotide
  source 1..20: mol_type = other RNA
aactcaaatgacctctatct

SEQ ID NO: 598 - RNA, 20 nt, synthetic construct
  misc_feature 1..20: note = Synthetic polynucleotide
  source 1..20: mol_type = other RNA
aactttttctttgcctgtac

SEQ ID NO: 599 - RNA, 20 nt, synthetic construct
  misc_feature 1..20: note = Synthetic polynucleotide
  source 1..20: mol_type = other RNA
aagcaagaatgaatattacc

SEQ ID NO: 600 - RNA, 20 nt, synthetic construct
  misc_feature 1..20: note = Synthetic polynucleotide
  source 1..20: mol_type = other RNA
aatcaatgatagctggagtg

SEQ ID NO: 601 - RNA, 20 nt, synthetic construct
  misc_feature 1..20: note = Synthetic polynucleotide
  source 1..20: mol_type = other RNA
aatgcctggctgtcattcag

SEQ ID NO: 602 - RNA, 20 nt, synthetic construct
  misc_feature 1..20: note = Synthetic polynucleotide
  source 1..20: mol_type = other RNA
aattcagagatcaggtcaag

SEQ ID NO: 603 - RNA, 20 nt, synthetic construct
  misc_feature 1..20: note = Synthetic polynucleotide
  source 1..20: mol_type = other RNA
acacagtctgtactcactct

SEQ ID NO: 604 - RNA, 20 nt, synthetic construct
  misc_feature 1..20: note = Synthetic polynucleotide
  source 1..20: mol_type = other RNA
acactacacctcaacatatc

SEQ ID NO: 605 - RNA, 20 nt, synthetic construct
  misc_feature 1..20: note = Synthetic polynucleotide
  source 1..20: mol_type = other RNA
acagaccttgaaacttcaag

SEQ ID NO: 606 - RNA, 20 nt, synthetic construct
  misc_feature 1..20: note = Synthetic polynucleotide
  source 1..20: mol_type = other RNA
acagatgcgtcaggcatctc

SEQ ID NO: 607 - RNA, 20 nt, synthetic construct
  misc_feature 1..20: note = Synthetic polynucleotide
  source 1..20: mol_type = other RNA
acatgctagtagaccctgat

SEQ ID NO: 608 - RNA, 20 nt, synthetic construct
  misc_feature 1..20: note = Synthetic polynucleotide
  source 1..20: mol_type = other RNA
acatttcggcaatgacacac

SEQ ID NO: 609 - RNA, 20 nt, synthetic construct
  misc_feature 1..20: note = Synthetic polynucleotide
  source 1..20: mol_type = other RNA
accaactcctacccttacct

SEQ ID NO: 610 - RNA, 20 nt, synthetic construct
  misc_feature 1..20: note = Synthetic polynucleotide
  source 1..20: mol_type = other RNA
accaatcccttacctggagg

SEQ ID NO: 611 - RNA, 20 nt, synthetic construct
  misc_feature 1..20: note = Synthetic polynucleotide
  source 1..20: mol_type = other RNA
acccacccagcaaccaccag

SEQ ID NO: 612 - RNA, 20 nt, synthetic construct
  misc_feature 1..20: note = Synthetic polynucleotide
  source 1..20: mol_type = other RNA
acccctatgaatcagtaacc

SEQ ID NO: 613 - RNA, 20 nt, synthetic construct
  misc_feature 1..20: note = Synthetic polynucleotide
  source 1..20: mol_type = other RNA
accgcacataggaagacctg

SEQ ID NO: 614 - RNA, 20 nt, synthetic construct
  misc_feature 1..20: note = Synthetic polynucleotide
  source 1..20: mol_type = other RNA
accgggtgatgcaagcaaca

SEQ ID NO: 615 - RNA, 20 nt, synthetic construct
  misc_feature 1..20: note = Synthetic polynucleotide
  source 1..20: mol_type = other RNA
acggtgcagcagtagaggac

SEQ ID NO: 616 - RNA, 20 nt, synthetic construct
  misc_feature 1..20: note = Synthetic polynucleotide
  source 1..20: mol_type = other RNA
acgtctcgccccactgcaag

SEQ ID NO: 617 - RNA, 20 nt, synthetic construct
  misc_feature 1..20: note = Synthetic polynucleotide
  source 1..20: mol_type = other RNA
acgtggggggaccagtgcat

SEQ ID NO: 618 - RNA, 20 nt, synthetic construct
  misc_feature 1..20: note = Synthetic polynucleotide
  source 1..20: mol_type = other RNA
acgttaacggccgggtgagg

SEQ ID NO: 619 - RNA, 20 nt, synthetic construct
  misc_feature 1..20: note = Synthetic polynucleotide
  source 1..20: mol_type = other RNA
actagtaatgggtactattt

SEQ ID NO: 620 - RNA, 20 nt, synthetic construct
  misc_feature 1..20: note = Synthetic polynucleotide
  source 1..20: mol_type = other RNA
actcttgccaagagtaacct

SEQ ID NO: 621 - RNA, 20 nt, synthetic construct
  misc_feature 1..20: note = Synthetic polynucleotide
  source 1..20: mol_type = other RNA
actgaagacctagagaatta

SEQ ID NO: 622 - RNA, 20 nt, synthetic construct
  misc_feature 1..20: note = Synthetic polynucleotide
  source 1..20: mol_type = other RNA
actgcaccctaaagagggta

SEQ ID NO: 623 - RNA, 20 nt, synthetic construct
  misc_feature 1..20: note = Synthetic polynucleotide
  source 1..20: mol_type = other RNA
actgctgcaccgtgggtaag

SEQ ID NO: 624 - RNA, 20 nt, synthetic construct
  misc_feature 1..20: note = Synthetic polynucleotide
  source 1..20: mol_type = other RNA
actgtctctacatttagaat

SEQ ID NO: 625 - RNA, 20 nt, synthetic construct
  misc_feature 1..20: note = Synthetic polynucleotide
  source 1..20: mol_type = other RNA
agaaacatgacgaaagtgtc

SEQ ID NO: 626 - RNA, 20 nt, synthetic construct
  misc_feature 1..20: note = Synthetic polynucleotide
  source 1..20: mol_type = other RNA
agaaggagggaatcctaatg

SEQ ID NO: 627 - RNA, 20 nt, synthetic construct
  misc_feature 1..20: note = Synthetic polynucleotide
  source 1..20: mol_type = other RNA
agacataccagttatgatag

SEQ ID NO: 628 - RNA, 20 nt, synthetic construct
  misc_feature 1..20: note = Synthetic polynucleotide
  source 1..20: mol_type = other RNA
agagcggtggctgggtggcc

SEQ ID NO: 629 - RNA, 20 nt, synthetic construct
  misc_feature 1..20: note = Synthetic polynucleotide
  source 1..20: mol_type = other RNA
agatgtcaacactcctcatt

SEQ ID NO: 630 - RNA, 20 nt, synthetic construct
  misc_feature 1..20: note = Synthetic polynucleotide
  source 1..20: mol_type = other RNA
agcatgcggggtaaccgcag

SEQ ID NO: 631 - RNA, 20 nt, synthetic construct
  misc_feature 1..20: note = Synthetic polynucleotide
  source 1..20: mol_type = other RNA
agccagctagcatccagaaa

SEQ ID NO: 632 - RNA, 20 nt, synthetic construct
  misc_feature 1..20: note = Synthetic polynucleotide
  source 1..20: mol_type = other RNA
agccatccaaagagacaaca

SEQ ID NO: 633 - RNA, 20 nt, synthetic construct
  misc_feature 1..20: note = Synthetic polynucleotide
  source 1..20: mol_type = other RNA
agctagcctgaagcaggtgg

SEQ ID NO: 634 - RNA, 20 nt, synthetic construct
  misc_feature 1..20: note = Synthetic polynucleotide
  source 1..20: mol_type = other RNA
aggagcggtcagtgacgcga

SEQ ID NO: 635 - RNA, 20 nt, synthetic construct
  misc_feature 1..20: note = Synthetic polynucleotide
  source 1..20: mol_type = other RNA
aggattaggcttaaaaggac

SEQ ID NO: 636 - RNA, 20 nt, synthetic construct
  misc_feature 1..20: note = Synthetic polynucleotide
  source 1..20: mol_type = other RNA
aggcttgggctgtcattcag

SEQ ID NO: 637 - RNA, 20 nt, synthetic construct
  misc_feature 1..20: note = Synthetic polynucleotide
  source 1..20: mol_type = other RNA
agggcgcaatggttcatgga

SEQ ID NO: 638 - RNA, 20 nt, synthetic construct
  misc_feature 1..20: note = Synthetic polynucleotide
  source 1..20: mol_type = other RNA
agggcgctgataaacaaagg

SEQ ID NO: 639 - RNA, 20 nt, synthetic construct
  misc_feature 1..20: note = Synthetic polynucleotide
  source 1..20: mol_type = other RNA
agggctccaaaaagtaaacc

SEQ ID NO: 640 - RNA, 20 nt, synthetic construct
  misc_feature 1..20: note = Synthetic polynucleotide
  source 1..20: mol_type = other RNA
agggtgattgcagttccgtg

SEQ ID NO: 641 - RNA, 20 nt, synthetic construct
  misc_feature 1..20: note = Synthetic polynucleotide
  source 1..20: mol_type = other RNA
agtcactgcactgcgcaaat

SEQ ID NO: 642 - RNA, 20 nt, synthetic construct
  misc_feature 1..20: note = Synthetic polynucleotide
  source 1..20: mol_type = other RNA
agtcattacctgagaaggca

SEQ ID NO: 643 - RNA, 20 nt, synthetic construct
  misc_feature 1..20: note = Synthetic polynucleotide
  source 1..20: mol_type = other RNA
agtccacactgaggttacat

SEQ ID NO: 644 - RNA, 20 nt, synthetic construct
  misc_feature 1..20: note = Synthetic polynucleotide
  source 1..20: mol_type = other RNA
agtcctctactgctgcaccg

SEQ ID NO: 645 - RNA, 20 nt, synthetic construct
  misc_feature 1..20: note = Synthetic polynucleotide
  source 1..20: mol_type = other RNA
agtgtatcttctgagatcaa

SEQ ID NO: 646 - RNA, 20 nt, synthetic construct
  misc_feature 1..20: note = Synthetic polynucleotide
  source 1..20: mol_type = other RNA
atactacttatatgccaatg

SEQ ID NO: 647 - RNA, 20 nt, synthetic construct
  misc_feature 1..20: note = Synthetic polynucleotide
  source 1..20: mol_type = other RNA
atactcactatagtaaaaat

SEQ ID NO: 648 - RNA, 20 nt, synthetic construct
  misc_feature 1..20: note = Synthetic polynucleotide
  source 1..20: mol_type = other RNA
atagtaaactctcagaaatg

SEQ ID NO: 649 - RNA, 20 nt, synthetic construct
  misc_feature 1..20: note = Synthetic polynucleotide
  source 1..20: mol_type = other RNA
atagtgtatctctacccata

SEQ ID NO: 650 - RNA, 20 nt, synthetic construct
  misc_feature 1..20: note = Synthetic polynucleotide
  source 1..20: mol_type = other RNA
atatggctttaaccacctct

SEQ ID NO: 651 - RNA, 20 nt, synthetic construct
  misc_feature 1..20: note = Synthetic polynucleotide
  source 1..20: mol_type = other RNA
atcacgttaacggccgggtg

SEQ ID NO: 652 - RNA, 20 nt, synthetic construct
  misc_feature 1..20: note = Synthetic polynucleotide
  source 1..20: mol_type = other RNA
atcccaaaggcttcagaagg

SEQ ID NO: 653 - RNA, 20 nt, synthetic construct
  misc_feature 1..20: note = Synthetic polynucleotide
  source 1..20: mol_type = other RNA
atctgccatattaggatccc

SEQ ID NO: 654 - RNA, 20 nt, synthetic construct
  misc_feature 1..20: note = Synthetic polynucleotide
  source 1..20: mol_type = other RNA
atcttccttacatctttggg

SEQ ID NO: 655 - RNA, 20 nt, synthetic construct
  misc_feature 1..20: note = Synthetic polynucleotide
  source 1..20: mol_type = other RNA
atcttgaaggagctgcacaa

SEQ ID NO: 656 - RNA, 20 nt, synthetic construct
  misc_feature 1..20: note = Synthetic polynucleotide
  source 1..20: mol_type = other RNA
atgatctatccattccgtat

SEQ ID NO: 657 - RNA, 20 nt, synthetic construct
  misc_feature 1..20: note = Synthetic polynucleotide
  source 1..20: mol_type = other RNA
atgcctgacgcatctgtctg

SEQ ID NO: 658 - RNA, 20 nt, synthetic construct
  misc_feature 1..20: note = Synthetic polynucleotide
  source 1..20: mol_type = other RNA
atgtggactaaatatgtatt

SEQ ID NO: 659 - RNA, 20 nt, synthetic construct
  misc_feature 1..20: note = Synthetic polynucleotide
  source 1..20: mol_type = other RNA
atgtttgtaatagaaagtgt

SEQ ID NO: 660 - RNA, 20 nt, synthetic construct
  misc_feature 1..20: note = Synthetic polynucleotide
  source 1..20: mol_type = other RNA
attaccaacccttcttctac

SEQ ID NO: 661 - RNA, 20 nt, synthetic construct
  misc_feature 1..20: note = Synthetic polynucleotide
  source 1..20: mol_type = other RNA
attgtatgacacatacactt

SEQ ID NO: 662 - RNA, 20 nt, synthetic construct
  misc_feature 1..20: note = Synthetic polynucleotide
  source 1..20: mol_type = other RNA
atttggactgctaacaccat

SEQ ID NO: 663 - RNA, 20 nt, synthetic construct
  misc_feature 1..20: note = Synthetic polynucleotide
  source 1..20: mol_type = other RNA
caagaacacttaacagcttc

SEQ ID NO: 664 - RNA, 20 nt, synthetic construct
  misc_feature 1..20: note = Synthetic polynucleotide
  source 1..20: mol_type = other RNA
caagaacctggcatatacga

SEQ ID NO: 665 - RNA, 20 nt, synthetic construct
  misc_feature 1..20: note = Synthetic polynucleotide
  source 1..20: mol_type = other RNA
caatcatctactggtaagca

SEQ ID NO: 666 - RNA, 20 nt, synthetic construct
  misc_feature 1..20: note = Synthetic polynucleotide
  source 1..20: mol_type = other RNA
caatcccttacctggaggtg

SEQ ID NO: 667 - RNA, 20 nt, synthetic construct
  misc_feature 1..20: note = Synthetic polynucleotide
  source 1..20: mol_type = other RNA
cacacacaatgcataggaca

SEQ ID NO: 668 - RNA, 20 nt, synthetic construct
  misc_feature 1..20: note = Synthetic polynucleotide
  source 1..20: mol_type = other RNA
cacccagcaaccaccagagg

SEQ ID NO: 669 - RNA, 20 nt, synthetic construct
  misc_feature 1..20: note = Synthetic polynucleotide
  source 1..20: mol_type = other RNA
caccctgcatcccaactact

SEQ ID NO: 670 - RNA, 20 nt, synthetic construct
  misc_feature 1..20: note = Synthetic polynucleotide
  source 1..20: mol_type = other RNA
caccggaatgacctgggggg

SEQ ID NO: 671 - RNA, 20 nt, synthetic construct
  misc_feature 1..20: note = Synthetic polynucleotide
  source 1..20: mol_type = other RNA
cacctttgtattggtcatct

SEQ ID NO: 672 - RNA, 20 nt, synthetic construct
  misc_feature 1..20: note = Synthetic polynucleotide
  source 1..20: mol_type = other RNA
cactacctgaacaccaccac

SEQ ID NO: 673 - RNA, 20 nt, synthetic construct
  misc_feature 1..20: note = Synthetic polynucleotide
  source 1..20: mol_type = other RNA
cagaagcttcaaagagtaga

SEQ ID NO: 674 - RNA, 20 nt, synthetic construct
  misc_feature 1..20: note = Synthetic polynucleotide
  source 1..20: mol_type = other RNA
cagagggcgctgataaacaa

SEQ ID NO: 675 - RNA, 20 nt, synthetic construct
  misc_feature 1..20: note = Synthetic polynucleotide
  source 1..20: mol_type = other RNA
caggtcattccggtgaggga

SEQ ID NO: 676 - RNA, 20 nt, synthetic construct
  misc_feature 1..20: note = Synthetic polynucleotide
  source 1..20: mol_type = other RNA
cagtagacatacttatatag

SEQ ID NO: 677 - RNA, 20 nt, synthetic construct
  misc_feature 1..20: note = Synthetic polynucleotide
  source 1..20: mol_type = other RNA
cagtccttctgcgtttgact

SEQ ID NO: 678 - RNA, 20 nt, synthetic construct
  misc_feature 1..20: note = Synthetic polynucleotide
  source 1..20: mol_type = other RNA
cagtgggtattggcggcggt

SEQ ID NO: 679 - RNA, 20 nt, synthetic construct
  misc_feature 1..20: note = Synthetic polynucleotide
  source 1..20: mol_type = other RNA
cataagcaacctgggatcaa

SEQ ID NO: 680 - RNA, 20 nt, synthetic construct
  misc_feature 1..20: note = Synthetic polynucleotide
  source 1..20: mol_type = other RNA
catactagcttcctcaccaa

SEQ ID NO: 681 - RNA, 20 nt, synthetic construct
  misc_feature 1..20: note = Synthetic polynucleotide
  source 1..20: mol_type = other RNA
cattcctcaaacagctccag

SEQ ID NO: 682 - RNA, 20 nt, synthetic construct
  misc_feature 1..20: note = Synthetic polynucleotide
  source 1..20: mol_type = other RNA
ccaatcacccacctttctcc

SEQ ID NO: 683 - RNA, 20 nt, synthetic construct
  misc_feature 1..20: note = Synthetic polynucleotide
  source 1..20: mol_type = other RNA
ccaccgcagacacccgcaat

SEQ ID NO: 684 - RNA, 20 nt, synthetic construct
  misc_feature 1..20: note = Synthetic polynucleotide
  source 1..20: mol_type = other RNA
ccactacacacacaatgcat

SEQ ID NO: 685 - RNA, 20 nt, synthetic construct
  misc_feature 1..20: note = Synthetic polynucleotide
  source 1..20: mol_type = other RNA
ccaggtcattccggtgaggg

SEQ ID NO: 686 - RNA, 20 nt, synthetic construct
  misc_feature 1..20: note = Synthetic polynucleotide
  source 1..20: mol_type = other RNA
ccagtgagctagcctgaagc

SEQ ID NO: 687 - RNA, 20 nt, synthetic construct
  misc_feature 1..20: note = Synthetic polynucleotide
  source 1..20: mol_type = other RNA
ccatcccacacaggcggagg

SEQ ID NO: 688 - RNA, 20 nt, synthetic construct
  misc_feature 1..20: note = Synthetic polynucleotide
  source 1..20: mol_type = other RNA
cccactctaccacacaggtt

SEQ ID NO: 689 - RNA, 20 nt, synthetic construct
  misc_feature 1..20: note = Synthetic polynucleotide
  source 1..20: mol_type = other RNA
cccatctcaccatgcaagag

SEQ ID NO: 690 - RNA, 20 nt, synthetic construct
  misc_feature 1..20: note = Synthetic polynucleotide
  source 1..20: mol_type = other RNA
cccccacctaagatctaagt

SEQ ID NO: 691 - RNA, 20 nt, synthetic construct
  misc_feature 1..20: note = Synthetic polynucleotide
  source 1..20: mol_type = other RNA
cccccaggtcattccggtga

SEQ ID NO: 692 - RNA, 20 nt, synthetic construct
  misc_feature 1..20: note = Synthetic polynucleotide
  source 1..20: mol_type = other RNA
ccccccaggtcattccggtg

SEQ ID NO: 693 - RNA, 20 nt, synthetic construct
  misc_feature 1..20: note = Synthetic polynucleotide
  source 1..20: mol_type = other RNA
cccctaatcccgaatagcat

SEQ ID NO: 694 - RNA, 20 nt, synthetic construct
  misc_feature 1..20: note = Synthetic polynucleotide
  source 1..20: mol_type = other RNA
cccctctactgcgccacaac

SEQ ID NO: 695 - RNA, 20 nt, synthetic construct
  misc_feature 1..20: note = Synthetic polynucleotide
  source 1..20: mol_type = other RNA
cccggaggcggcatgcctat

SEQ ID NO: 696 - RNA, 20 nt, synthetic construct
  misc_feature 1..20: note = Synthetic polynucleotide
  source 1..20: mol_type = other RNA
ccctcaccggaatgacctgg

SEQ ID NO: 697 - RNA, 20 nt, synthetic construct
  misc_feature 1..20: note = Synthetic polynucleotide
  source 1..20: mol_type = other RNA
ccctcaggtcttcctatgtg

SEQ ID NO: 698 - RNA, 20 nt, synthetic construct
  misc_feature 1..20: note = Synthetic polynucleotide
  source 1..20: mol_type = other RNA
ccgcacataggaagacctga

SEQ ID NO: 699 - RNA, 20 nt, synthetic construct
  misc_feature 1..20: note = Synthetic polynucleotide
  source 1..20: mol_type = other RNA
ccggacagcgacaggccccg

SEQ ID NO: 700 - RNA, 20 nt, synthetic construct
  misc_feature 1..20: note = Synthetic polynucleotide
  source 1..20: mol_type = other RNA
cctaaaaaatagctaaacag

SEQ ID NO: 701 - RNA, 20 nt, synthetic construct
  misc_feature 1..20: note = Synthetic polynucleotide
  source 1..20: mol_type = other RNA
cctaatttacactcaccctc

SEQ ID NO: 702 - RNA, 20 nt, synthetic construct
  misc_feature 1..20: note = Synthetic polynucleotide
  source 1..20: mol_type = other RNA
cctacgataggtagaaaccc

SEQ ID NO: 703 - RNA, 20 nt, synthetic construct
  misc_feature 1..20: note = Synthetic polynucleotide
  source 1..20: mol_type = other RNA
cctacttagatcttaggtgg

SEQ ID NO: 704 - RNA, 20 nt, synthetic construct
  misc_feature 1..20: note = Synthetic polynucleotide
  source 1..20: mol_type = other RNA
cctattgcgggtgtctgcgg

SEQ ID NO: 705 - RNA, 20 nt, synthetic construct
  misc_feature 1..20: note = Synthetic polynucleotide
  source 1..20: mol_type = other RNA
cctcaccggaatgacctggg

SEQ ID NO: 706 - RNA, 20 nt, synthetic construct
  misc_feature 1..20: note = Synthetic polynucleotide
  source 1..20: mol_type = other RNA
cctccctcaccggaatgacc

SEQ ID NO: 707 - RNA, 20 nt, synthetic construct
  misc_feature 1..20: note = Synthetic polynucleotide
  source 1..20: mol_type = other RNA
cctgagagtccatcatctgc

SEQ ID NO: 708 - RNA, 20 nt, synthetic construct
  misc_feature 1..20: note = Synthetic polynucleotide
  source 1..20: mol_type = other RNA
cctgagggtgagtgtaaatt

SEQ ID NO: 709 - RNA, 20 nt, synthetic construct
  misc_feature 1..20: note = Synthetic polynucleotide
  source 1..20: mol_type = other RNA
cctgtcgcgacaccacagtt

SEQ ID NO: 710 - RNA, 20 nt, synthetic construct
  misc_feature 1..20: note = Synthetic polynucleotide
  source 1..20: mol_type = other RNA
ccttgacattctctgtatgg

SEQ ID NO: 711 - RNA, 20 nt, synthetic construct
  misc_feature 1..20: note = Synthetic polynucleotide
  source 1..20: mol_type = other RNA
cgacatagccttccaagacc

SEQ ID NO: 712 - RNA, 20 nt, synthetic construct
  misc_feature 1..20: note = Synthetic polynucleotide
  source 1..20: mol_type = other RNA
cgagcggacaggataccatc

SEQ ID NO: 713 - RNA, 20 nt, synthetic construct
  misc_feature 1..20: note = Synthetic polynucleotide
  source 1..20: mol_type = other RNA
cgcctaaaatccctatgcac

SEQ ID NO: 714 - RNA, 20 nt, synthetic construct
  misc_feature 1..20: note = Synthetic polynucleotide
  source 1..20: mol_type = other RNA
cgcctaccagtcaactcccc

SEQ ID NO: 715 - RNA, 20 nt, synthetic construct
  misc_feature 1..20: note = Synthetic polynucleotide
  source 1..20: mol_type = other RNA
cgcgacaccacagttggggg

SEQ ID NO: 716 - RNA, 20 nt, synthetic construct
  misc_feature 1..20: note = Synthetic polynucleotide
  source 1..20: mol_type = other RNA
cggcagttgctcaatatgaa

SEQ ID NO: 717 - RNA, 20 nt, synthetic construct
  misc_feature 1..20: note = Synthetic polynucleotide
  source 1..20: mol_type = other RNA
cggtcagtgacgcgatggag

SEQ ID NO: 718 - RNA, 20 nt, synthetic construct
  misc_feature 1..20: note = Synthetic polynucleotide
  source 1..20: mol_type = other RNA
cgtgaagtgatcggtattta

SEQ ID NO: 719 - RNA, 20 nt, synthetic construct
  misc_feature 1..20: note = Synthetic polynucleotide
  source 1..20: mol_type = other RNA
cgtggggggaccagtgcata

SEQ ID NO: 720 - RNA, 20 nt, synthetic construct
  misc_feature 1..20: note = Synthetic polynucleotide
  source 1..20: mol_type = other RNA
cgtgtggcgagggtacgtgg

SEQ ID NO: 721 - RNA, 20 nt, synthetic construct
  misc_feature 1..20: note = Synthetic polynucleotide
  source 1..20: mol_type = other RNA
ctaaagcgagggttcctaaa

SEQ ID NO: 722 - RNA, 20 nt, synthetic construct
  misc_feature 1..20: note = Synthetic polynucleotide
  source 1..20: mol_type = other RNA
ctaactacttcagttaccct

SEQ ID NO: 723 - RNA, 20 nt, synthetic construct
  misc_feature 1..20: note = Synthetic polynucleotide
  source 1..20: mol_type = other RNA
ctacctcagaggagtgtcaa

SEQ ID NO: 724 - RNA, 20 nt, synthetic construct
  misc_feature 1..20: note = Synthetic polynucleotide
  source 1..20: mol_type = other RNA
ctacctgctgaaatcagtga

SEQ ID NO: 725 - RNA, 20 nt, synthetic construct
  misc_feature 1..20: note = Synthetic polynucleotide
  source 1..20: mol_type = other RNA
ctactgcgccacaaccggaa

SEQ ID NO: 726 - RNA, 20 nt, synthetic construct
  misc_feature 1..20: note = Synthetic polynucleotide
  source 1..20: mol_type = other RNA
ctactgctgcaccgtgggta

SEQ ID NO: 727 - RNA, 20 nt, synthetic construct
  misc_feature 1..20: note = Synthetic polynucleotide
  source 1..20: mol_type = other RNA
ctattggcgtccctcgagca

SEQ ID NO: 728 - RNA, 20 nt, synthetic construct
  misc_feature 1..20: note = Synthetic polynucleotide
  source 1..20: mol_type = other RNA
ctcataaaatggctgctcaa

SEQ ID NO: 729 - RNA, 20 nt, synthetic construct
  misc_feature 1..20: note = Synthetic polynucleotide
  source 1..20: mol_type = other RNA
ctcctacttagatcttaggt

SEQ ID NO: 730 - RNA, 20 nt, synthetic construct
  misc_feature 1..20: note = Synthetic polynucleotide
  source 1..20: mol_type = other RNA
ctctacacagagattgtaca

SEQ ID NO: 731 - RNA, 20 nt, synthetic construct
  misc_feature 1..20: note = Synthetic polynucleotide
  source 1..20: mol_type = other RNA
ctctcattgcaacagtgctg

SEQ ID NO: 732 - RNA, 20 nt, synthetic construct
  misc_feature 1..20: note = Synthetic polynucleotide
  source 1..20: mol_type = other RNA
ctgagctcagagccttctgt

SEQ ID NO: 733 - RNA, 20 nt, synthetic construct
  misc_feature 1..20: note = Synthetic polynucleotide
  source 1..20: mol_type = other RNA
ctggcgcgcatgctcaggcg

SEQ ID NO: 734 - RNA, 20 nt, synthetic construct
  misc_feature 1..20: note = Synthetic polynucleotide
  source 1..20: mol_type = other RNA
ctgtcgcgacaccacagttg

SEQ ID NO: 735 - RNA, 20 nt, synthetic construct
  misc_feature 1..20: note = Synthetic polynucleotide
  source 1..20: mol_type = other RNA
cttaatgattatctctgggg

SEQ ID NO: 736 - RNA, 20 nt, synthetic construct
  misc_feature 1..20: note = Synthetic polynucleotide
  source 1..20: mol_type = other RNA
cttaccactgcaccctaaag

SEQ ID NO: 737 - RNA, 20 nt, synthetic construct
  misc_feature 1..20: note = Synthetic polynucleotide
  source 1..20: mol_type = other RNA
cttactcaagggaaaagctt

SEQ ID NO: 738 - RNA, 20 nt, synthetic construct
  misc_feature 1..20: note = Synthetic polynucleotide
  source 1..20: mol_type = other RNA
cttatgatttggtaggaagt

SEQ ID NO: 739 - RNA, 20 nt, synthetic construct
  misc_feature 1..20: note = Synthetic polynucleotide
  source 1..20: mol_type = other RNA
cttgcagtggggcgagacgt

SEQ ID NO: 740 - RNA, 20 nt, synthetic construct
  misc_feature 1..20: note = Synthetic polynucleotide
  source 1..20: mol_type = other RNA
cttgttggcatgtaaggatt

SEQ ID NO: 741 - RNA, 20 nt, synthetic construct
  misc_feature 1..20: note = Synthetic polynucleotide
  source 1..20: mol_type = other RNA
gaaacatgacgaaagtgtca

SEQ ID NO: 742 - RNA, 20 nt, synthetic construct
  misc_feature 1..20: note = Synthetic polynucleotide
  source 1..20: mol_type = other RNA
gaaaggtctgaggtcaactg

SEQ ID NO: 743 - RNA, 20 nt, synthetic construct
  misc_feature 1..20: note = Synthetic polynucleotide
  source 1..20: mol_type = other RNA
gaacagtgataggcaaagag

SEQ ID NO: 744 - RNA, 20 nt, synthetic construct
  misc_feature 1..20: note = Synthetic polynucleotide
  source 1..20: mol_type = other RNA
gaacatttgactaccagacc

SEQ ID NO: 745 - RNA, 20 nt, synthetic construct
  misc_feature 1..20: note = Synthetic polynucleotide
  source 1..20: mol_type = other RNA
gaacctgaggttagcagcaa

SEQ ID NO: 746 - RNA, 20 nt, synthetic construct
  misc_feature 1..20: note = Synthetic polynucleotide
  source 1..20: mol_type = other RNA
gaacttccagggctatttaa

SEQ ID NO: 747 - RNA, 20 nt, synthetic construct
  misc_feature 1..20: note = Synthetic polynucleotide
  source 1..20: mol_type = other RNA
gaattgttgggagacctatc

SEQ ID NO: 748 - RNA, 20 nt, synthetic construct
  misc_feature 1..20: note = Synthetic polynucleotide
  source 1..20: mol_type = other RNA
gacctcctacagcagttaaa

SEQ ID NO: 749 - RNA, 20 nt, synthetic construct
  misc_feature 1..20: note = Synthetic polynucleotide
  source 1..20: mol_type = other RNA
gactttggcggcggtaggca

SEQ ID NO: 750 - RNA, 20 nt, synthetic construct
  misc_feature 1..20: note = Synthetic polynucleotide
  source 1..20: mol_type = other RNA
gagcggacaggataccatcg

SEQ ID NO: 751 - RNA, 20 nt, synthetic construct
  misc_feature 1..20: note = Synthetic polynucleotide
  source 1..20: mol_type = other RNA
gatctgccatattaggatcc

SEQ ID NO: 752 - RNA, 20 nt, synthetic construct
  misc_feature 1..20: note = Synthetic polynucleotide
  source 1..20: mol_type = other RNA
gatgcgtcaggcatctccgg

SEQ ID NO: 753 - RNA, 20 nt, synthetic construct
  misc_feature 1..20: note = Synthetic polynucleotide
  source 1..20: mol_type = other RNA
gatgtacaacctaaccctca

SEQ ID NO: 754 - RNA, 20 nt, synthetic construct
  misc_feature 1..20: note = Synthetic polynucleotide
  source 1..20: mol_type = other RNA
gattcaaagaggaaatacat

SEQ ID NO: 755 - RNA, 20 nt, synthetic construct
  misc_feature 1..20: note = Synthetic polynucleotide
  source 1..20: mol_type = other RNA
gattcctcgctactccaata

SEQ ID NO: 756 - RNA, 20 nt, synthetic construct
  misc_feature 1..20: note = Synthetic polynucleotide
  source 1..20: mol_type = other RNA
gcaaaccagatgaccatcgc

SEQ ID NO: 757 - RNA, 20 nt, synthetic construct
  misc_feature 1..20: note = Synthetic polynucleotide
  source 1..20: mol_type = other RNA
gcaaggtagtaaacaagtgc

SEQ ID NO: 758 - RNA, 20 nt, synthetic construct
  misc_feature 1..20: note = Synthetic polynucleotide
  source 1..20: mol_type = other RNA
gcaatgagaatccatatcca

SEQ ID NO: 759 - RNA, 20 nt, synthetic construct
  misc_feature 1..20: note = Synthetic polynucleotide
  source 1..20: mol_type = other RNA
gcacgcctgcgcggccgcag

SEQ ID NO: 760 - RNA, 20 nt, synthetic construct
  misc_feature 1..20: note = Synthetic polynucleotide
  source 1..20: mol_type = other RNA
gcagatctaagccgctgcag

SEQ ID NO: 761 - RNA, 20 nt, synthetic construct
  misc_feature 1..20: note = Synthetic polynucleotide
  source 1..20: mol_type = other RNA
gcagcgagtctggcgcagag

SEQ ID NO: 762 - RNA, 20 nt, synthetic construct
  misc_feature 1..20: note = Synthetic polynucleotide
  source 1..20: mol_type = other RNA
gcaggacagtccttcaccac

SEQ ID NO: 763 - RNA, 20 nt, synthetic construct
  misc_feature 1..20: note = Synthetic polynucleotide
  source 1..20: mol_type = other RNA
gcaggctggcgcgcatgctc

SEQ ID NO: 764 - RNA, 20 nt, synthetic construct
  misc_feature 1..20: note = Synthetic polynucleotide
  source 1..20: mol_type = other RNA
gcagggtacgtggggcgact

SEQ ID NO: 765 - RNA, 20 nt, synthetic construct
  misc_feature 1..20: note = Synthetic polynucleotide
  source 1..20: mol_type = other RNA
gcctctgaacattccggatc

SEQ ID NO: 766 - RNA, 20 nt, synthetic construct
  misc_feature 1..20: note = Synthetic polynucleotide
  source 1..20: mol_type = other RNA
gcgaaggtacgtgaagtgat

SEQ ID NO: 767 - RNA, 20 nt, synthetic construct
  misc_feature 1..20: note = Synthetic polynucleotide
  source 1..20: mol_type = other RNA
gcgacagtgggtattggcgg

SEQ ID NO: 768 - RNA, 20 nt, synthetic construct
  misc_feature 1..20: note = Synthetic polynucleotide
  source 1..20: mol_type = other RNA
gcgcacaatacaaccaagag

SEQ ID NO: 769 - RNA, 20 nt, synthetic construct
  misc_feature 1..20: note = Synthetic polynucleotide
  source 1..20: mol_type = other RNA
gcgcagttgtaccatgaatg

SEQ ID NO: 770 - RNA, 20 nt, synthetic construct
  misc_feature 1..20: note = Synthetic polynucleotide
  source 1..20: mol_type = other RNA
gcgccccaatgcgagcggac

SEQ ID NO: 771 - RNA, 20 nt, synthetic construct
  misc_feature 1..20: note = Synthetic polynucleotide
  source 1..20: mol_type = other RNA
gcggcgacagtgggtattgg

SEQ ID NO: 772 - RNA, 20 nt, synthetic construct
  misc_feature 1..20: note = Synthetic polynucleotide
  source 1..20: mol_type = other RNA
gcggctctacagggaggaag

SEQ ID NO: 773 - RNA, 20 nt, synthetic construct
  misc_feature 1..20: note = Synthetic polynucleotide
  source 1..20: mol_type = other RNA
gctacaatgaaactttggag

SEQ ID NO: 774 - RNA, 20 nt, synthetic construct
  misc_feature 1..20: note = Synthetic polynucleotide
  source 1..20: mol_type = other RNA
gctcatcacaaatccagccc

SEQ ID NO: 775 - RNA, 20 nt, synthetic construct
  misc_feature 1..20: note = Synthetic polynucleotide
  source 1..20: mol_type = other RNA
gctcatgaaactttcatata

SEQ ID NO: 776 - RNA, 20 nt, synthetic construct
  misc_feature 1..20: note = Synthetic polynucleotide
  source 1..20: mol_type = other RNA
gctcctcagacagatgcgtc

SEQ ID NO: 777 - RNA, 20 nt, synthetic construct
  misc_feature 1..20: note = Synthetic polynucleotide
  source 1..20: mol_type = other RNA
gctggcgcgcatgctcaggc

SEQ ID NO: 778 - RNA, 20 nt, synthetic construct
  misc_feature 1..20: note = Synthetic polynucleotide
  source 1..20: mol_type = other RNA
gctgttctgtagttcgtctc

SEQ ID NO: 779 - RNA, 20 nt, synthetic construct
  misc_feature 1..20: note = Synthetic polynucleotide
  source 1..20: mol_type = other RNA
gcttctgaagacctagggga

SEQ ID NO: 780 - RNA, 20 nt, synthetic construct
  misc_feature 1..20: note = Synthetic polynucleotide
  source 1..20: mol_type = other RNA
gcttgtttgccgcagtgcag

SEQ ID NO: 781 - RNA, 20 nt, synthetic construct
  misc_feature 1..20: note = Synthetic polynucleotide
  source 1..20: mol_type = other RNA
ggaaaataaaacagcatgta

SEQ ID NO: 782 - RNA, 20 nt, synthetic construct
  misc_feature 1..20: note = Synthetic polynucleotide
  source 1..20: mol_type = other RNA
ggaattcgtcgcagtgaccg

SEQ ID NO: 783 - RNA, 20 nt, synthetic construct
  misc_feature 1..20: note = Synthetic polynucleotide
  source 1..20: mol_type = other RNA
ggacctcacgctccctttgc

SEQ ID NO: 784 - RNA, 20 nt, synthetic construct
  misc_feature 1..20: note = Synthetic polynucleotide
  source 1..20: mol_type = other RNA
ggactatccagagattaaga

SEQ ID NO: 785 - RNA, 20 nt, synthetic construct
  misc_feature 1..20: note = Synthetic polynucleotide
  source 1..20: mol_type = other RNA
ggcaaacaagcacgcctgcg

SEQ ID NO: 786 - RNA, 20 nt, synthetic construct
  misc_feature 1..20: note = Synthetic polynucleotide
  source 1..20: mol_type = other RNA
ggcaaagagaggataccaaa

SEQ ID NO: 787 - RNA, 20 nt, synthetic construct
  misc_feature 1..20: note = Synthetic polynucleotide
  source 1..20: mol_type = other RNA
ggcggagtgccccgtcctgg

SEQ ID NO: 788 - RNA, 20 nt, synthetic construct
  misc_feature 1..20: note = Synthetic polynucleotide
  source 1..20: mol_type = other RNA
ggctatgtcgaaataacctg

SEQ ID NO: 789 - RNA, 20 nt, synthetic construct
  misc_feature 1..20: note = Synthetic polynucleotide
  source 1..20: mol_type = other RNA
ggctctcctacttagatctt

SEQ ID NO: 790 - RNA, 20 nt, synthetic construct
  misc_feature 1..20: note = Synthetic polynucleotide
  source 1..20: mol_type = other RNA
ggctggcgcgcatgctcagg

SEQ ID NO: 791 - RNA, 20 nt, synthetic construct
  misc_feature 1..20: note = Synthetic polynucleotide
  source 1..20: mol_type = other RNA
gggaagttgactctgatcac

SEQ ID NO: 792 - RNA, 20 nt, synthetic construct
  misc_feature 1..20: note = Synthetic polynucleotide
  source 1..20: mol_type = other RNA
gggacgcgccccaatgcgag

SEQ ID NO: 793 - RNA, 20 nt, synthetic construct
  misc_feature 1..20: note = Synthetic polynucleotide
  source 1..20: mol_type = other RNA
ggggttgctctgccgacggg

SEQ ID NO: 794 - RNA, 20 nt, synthetic construct
  misc_feature 1..20: note = Synthetic polynucleotide
  source 1..20: mol_type = other RNA
gggtggctgccaagcttgct

SEQ ID NO: 795 - RNA, 20 nt, synthetic construct
  misc_feature 1..20: note = Synthetic polynucleotide
  source 1..20: mol_type = other RNA
gggtggtactgagaaactaa

SEQ ID NO: 796 - RNA, 20 nt, synthetic construct
  misc_feature 1..20: note = Synthetic polynucleotide
  source 1..20: mol_type = other RNA
gggttgctctgccgacgggt

SEQ ID NO: 797 - RNA, 20 nt, synthetic construct
  misc_feature 1..20: note = Synthetic polynucleotide
  source 1..20: mol_type = other RNA
ggtatcctgtccgctcgcat

SEQ ID NO: 798 - RNA, 20 nt, synthetic construct
  misc_feature 1..20: note = Synthetic polynucleotide
  source 1..20: mol_type = other RNA
ggtcagtgacgcgatggagc

SEQ ID NO: 799 - RNA, 20 nt, synthetic construct
  misc_feature 1..20: note = Synthetic polynucleotide
  source 1..20: mol_type = other RNA
gtaggaagtaggagatgaat

SEQ ID NO: 800 - RNA, 20 nt, synthetic construct
  misc_feature 1..20: note = Synthetic polynucleotide
  source 1..20: mol_type = other RNA
gtataatagtgaccactgcg

SEQ ID NO: 801 - RNA, 20 nt, synthetic construct
  misc_feature 1..20: note = Synthetic polynucleotide
  source 1..20: mol_type = other RNA
gtatatattgaaagtataaa

SEQ ID NO: 802 - RNA, 20 nt, synthetic construct
  misc_feature 1..20: note = Synthetic polynucleotide
  source 1..20: mol_type = other RNA
gtatcagaggtaaacatacc

SEQ ID NO: 803 - RNA, 20 nt, synthetic construct
  misc_feature 1..20: note = Synthetic polynucleotide
  source 1..20: mol_type = other RNA
gtatcctgtccgctcgcatt

SEQ ID NO: 804 - RNA, 20 nt, synthetic construct
  misc_feature 1..20: note = Synthetic polynucleotide
  source 1..20: mol_type = other RNA
gtcacagtgtgcggcaccag

SEQ ID NO: 805 - RNA, 20 nt, synthetic construct
  misc_feature 1..20: note = Synthetic polynucleotide
  source 1..20: mol_type = other RNA
gtcatttcatccggcctcat

SEQ ID NO: 806 - RNA, 20 nt, synthetic construct
  misc_feature 1..20: note = Synthetic polynucleotide
  source 1..20: mol_type = other RNA
gtcccccaactcctcggaca

SEQ ID NO: 807 - RNA, 20 nt, synthetic construct
  misc_feature 1..20: note = Synthetic polynucleotide
  source 1..20: mol_type = other RNA
gtcctctactgctgcaccgt

SEQ ID NO: 808 - RNA, 20 nt, synthetic construct
  misc_feature 1..20: note = Synthetic polynucleotide
  source 1..20: mol_type = other RNA
gtcgcgacaggtcctattgc

SEQ ID NO: 809 - RNA, 20 nt, synthetic construct
  misc_feature 1..20: note = Synthetic polynucleotide
  source 1..20: mol_type = other RNA
gtctagtgaggcacactgac

SEQ ID NO: 810 - RNA, 20 nt, synthetic construct
  misc_feature 1..20: note = Synthetic polynucleotide
  source 1..20: mol_type = other RNA
gtcttgtaaagatacagcaa

SEQ ID NO: 811 - RNA, 20 nt, synthetic construct
  misc_feature 1..20: note = Synthetic polynucleotide
  source 1..20: mol_type = other RNA
gtgacacagaactgaaataa

SEQ ID NO: 812 - RNA, 20 nt, synthetic construct
  misc_feature 1..20: note = Synthetic polynucleotide
  source 1..20: mol_type = other RNA
gtgacgcaacacagaccccc

SEQ ID NO: 813 - RNA, 20 nt, synthetic construct
  misc_feature 1..20: note = Synthetic polynucleotide
  source 1..20: mol_type = other RNA
gtgacgcgatggagcgggca

SEQ ID NO: 814 - RNA, 20 nt, synthetic construct
  misc_feature 1..20: note = Synthetic polynucleotide
  source 1..20: mol_type = other RNA
gtgagctagcctgaagcagg

SEQ ID NO: 815 - RNA, 20 nt, synthetic construct
  misc_feature 1..20: note = Synthetic polynucleotide
  source 1..20: mol_type = other RNA
gtgtataaaggattcaagaa

SEQ ID NO: 816 - RNA, 20 nt, synthetic construct
  misc_feature 1..20: note = Synthetic polynucleotide
  source 1..20: mol_type = other RNA
gtgttcaccaatcccttacc

SEQ ID NO: 817 - RNA, 20 nt, synthetic construct
  misc_feature 1..20: note = Synthetic polynucleotide
  source 1..20: mol_type = other RNA
gtgttttctgttggggtgat

SEQ ID NO: 818 - RNA, 20 nt, synthetic construct
  misc_feature 1..20: note = Synthetic polynucleotide
  source 1..20: mol_type = other RNA
gttagagtactacttcttct

SEQ ID NO: 819 - RNA, 20 nt, synthetic construct
  misc_feature 1..20: note = Synthetic polynucleotide
  source 1..20: mol_type = other RNA
gttgtgccgttctgccccga

SEQ ID NO: 820 - RNA, 20 nt, synthetic construct
  misc_feature 1..20: note = Synthetic polynucleotide
  source 1..20: mol_type = other RNA
taactcaaatgacctctatc

SEQ ID NO: 821 - RNA, 20 nt, synthetic construct
  misc_feature 1..20: note = Synthetic polynucleotide
  source 1..20: mol_type = other RNA
taagatgacagagccctcac

SEQ ID NO: 822 - RNA, 20 nt, synthetic construct
  misc_feature 1..20: note = Synthetic polynucleotide
  source 1..20: mol_type = other RNA
tacaggccctaaatcaatcc

SEQ ID NO: 823 - RNA, 20 nt, synthetic construct
  misc_feature 1..20: note = Synthetic polynucleotide
  source 1..20: mol_type = other RNA
tacccacggtgcagcagtag

SEQ ID NO: 824 - RNA, 20 nt, synthetic construct
  misc_feature 1..20: note = Synthetic polynucleotide
  source 1..20: mol_type = other RNA
tactgctgcaccgtgggtaa

SEQ ID NO: 825 - RNA, 20 nt, synthetic construct
  misc_feature 1..20: note = Synthetic polynucleotide
  source 1..20: mol_type = other RNA
tagaggtgagtgggagcata

SEQ ID NO: 826 - RNA, 20 nt, synthetic construct
  misc_feature 1..20: note = Synthetic polynucleotide
  source 1..20: mol_type = other RNA
tagatgaactaaagaacctg

SEQ ID NO: 827 - RNA, 20 nt, synthetic construct
  misc_feature 1..20: note = Synthetic polynucleotide
  source 1..20: mol_type = other RNA
tagcatggttgactatctgt

SEQ ID NO: 828 - RNA, 20 nt, synthetic construct
  misc_feature 1..20: note = Synthetic polynucleotide
  source 1..20: mol_type = other RNA
tagtgttaggaagatcaaat

SEQ ID NO: 829 - RNA, 20 nt, synthetic construct
  misc_feature 1..20: note = Synthetic polynucleotide
  source 1..20: mol_type = other RNA
tatagaagctaacatgggaa

SEQ ID NO: 830 - RNA, 20 nt, synthetic construct
  misc_feature 1..20: note = Synthetic polynucleotide
  source 1..20: mol_type = other RNA
tatccgggctccgggtctct

SEQ ID NO: 831 - RNA, 20 nt, synthetic construct
  misc_feature 1..20: note = Synthetic polynucleotide
  source 1..20: mol_type = other RNA
tatccttaacctgtactgat

SEQ ID NO: 832 - RNA, 20 nt, synthetic construct
  misc_feature 1..20: note = Synthetic polynucleotide
  source 1..20: mol_type = other RNA
tatggtgagcagttccccaa

SEQ ID NO: 833 - RNA, 20 nt, synthetic construct
  misc_feature 1..20: note = Synthetic polynucleotide
  source 1..20: mol_type = other RNA
tattggcgtccctcgagcag

SEQ ID NO: 834 - RNA, 20 nt, synthetic construct
  misc_feature 1..20: note = Synthetic polynucleotide
  source 1..20: mol_type = other RNA
tatacacactcctagtataa

SEQ ID NO: 835 - RNA, 20 nt, synthetic construct
  misc_feature 1..20: note = Synthetic polynucleotide
  source 1..20: mol_type = other RNA
tcaactaagtggtcaaaaaa

SEQ ID NO: 836 - RNA, 20 nt, synthetic construct
  misc_feature 1..20: note = Synthetic polynucleotide
  source 1..20: mol_type = other RNA
tcaagaacctggcatatacg

SEQ ID NO: 837 - RNA, 20 nt, synthetic construct
  misc_feature 1..20: note = Synthetic polynucleotide
  source 1..20: mol_type = other RNA
tcacataaaaactacctcag

SEQ ID NO: 838 - RNA, 20 nt, synthetic construct
  misc_feature 1..20: note = Synthetic polynucleotide
  source 1..20: mol_type = other RNA
tcacctctaatgcctggtgg

SEQ ID NO: 839 - RNA, 20 nt, synthetic construct
  misc_feature 1..20: note = Synthetic polynucleotide
  source 1..20: mol_type = other RNA
tcacgtaatggggacacatt

SEQ ID NO: 840 - RNA, 20 nt, synthetic construct
  misc_feature 1..20: note = Synthetic polynucleotide
  source 1..20: mol_type = other RNA
tcactactgtaaaacaagct

SEQ ID NO: 841 - RNA, 20 nt, synthetic construct
  misc_feature 1..20: note = Synthetic polynucleotide
  source 1..20: mol_type = other RNA
tcactcttggttgctcagtg

SEQ ID NO: 842 - RNA, 20 nt, synthetic construct
  misc_feature 1..20: note = Synthetic polynucleotide
  source 1..20: mol_type = other RNA
tcatactagcttcctcacca

SEQ ID NO: 843 - RNA, 20 nt, synthetic construct
  misc_feature 1..20: note = Synthetic polynucleotide
  source 1..20: mol_type = other RNA
tccatgttcaattcaggttg

SEQ ID NO: 844 - RNA, 20 nt, synthetic construct
  misc_feature 1..20: note = Synthetic polynucleotide
  source 1..20: mol_type = other RNA
tcccaatactacttatgatt

SEQ ID NO: 845 - RNA, 20 nt, synthetic construct
  misc_feature 1..20: note = Synthetic polynucleotide
  source 1..20: mol_type = other RNA
tcccactcacctctaatgcc

SEQ ID NO: 846 - RNA, 20 nt, synthetic construct
  misc_feature 1..20: note = Synthetic polynucleotide
  source 1..20: mol_type = other RNA
tccctcaccggaatgacctg

SEQ ID NO: 847 - RNA, 20 nt, synthetic construct
  misc_feature 1..20: note = Synthetic polynucleotide
  source 1..20: mol_type = other RNA
tccgtgtggcgagggtacgt

SEQ ID NO: 848 - RNA, 20 nt, synthetic construct
  misc_feature 1..20: note = Synthetic polynucleotide
  source 1..20: mol_type = other RNA
tcctacttagatcttaggtg

SEQ ID NO: 849 - RNA, 20 nt, synthetic construct
  misc_feature 1..20: note = Synthetic polynucleotide
  source 1..20: mol_type = other RNA
tcgttgtgacactactgagt

SEQ ID NO: 850 - RNA, 20 nt, synthetic construct
  misc_feature 1..20: note = Synthetic polynucleotide
  source 1..20: mol_type = other RNA
tctacacagagattgtacaa

SEQ ID NO: 851 - RNA, 20 nt, synthetic construct
  misc_feature 1..20: note = Synthetic polynucleotide
  source 1..20: mol_type = other RNA
tctatcataactggtatgtc

SEQ ID NO: 852 - RNA, 20 nt, synthetic construct
  misc_feature 1..20: note = Synthetic polynucleotide
  source 1..20: mol_type = other RNA
tctcctacttagatcttagg

SEQ ID NO: 853 - RNA, 20 nt, synthetic construct
  misc_feature 1..20: note = Synthetic polynucleotide
  source 1..20: mol_type = other RNA
tctcgccccactgcaagcgg

SEQ ID NO: 854 - RNA, 20 nt, synthetic construct
  misc_feature 1..20: note = Synthetic polynucleotide
  source 1..20: mol_type = other RNA
tctgacctaattcagagatc

SEQ ID NO: 855 - RNA, 20 nt, synthetic construct
  misc_feature 1..20: note = Synthetic polynucleotide
  source 1..20: mol_type = other RNA
tcttggtggacgcattcctg

SEQ ID NO: 856 - RNA, 20 nt, synthetic construct
  misc_feature 1..20: note = Synthetic polynucleotide
  source 1..20: mol_type = other RNA
tgaaaaggtacgattttcca

SEQ ID NO: 857 - RNA, 20 nt, synthetic construct
  misc_feature 1..20: note = Synthetic polynucleotide
  source 1..20: mol_type = other RNA
tgaagtgatcggtatttagg

SEQ ID NO: 858 - RNA, 20 nt, synthetic construct
  misc_feature 1..20: note = Synthetic polynucleotide
  source 1..20: mol_type = other RNA
tgaccgaggcgaggaggcta

SEQ ID NO: 859 - RNA, 20 nt, synthetic construct
  misc_feature 1..20: note = Synthetic polynucleotide
  source 1..20: mol_type = other RNA
tgacgcatctgtctgaggag

SEQ ID NO: 860 - RNA, 20 nt, synthetic construct
  misc_feature 1..20: note = Synthetic polynucleotide
  source 1..20: mol_type = other RNA
tgagctcagagccttctgtg

SEQ ID NO: 861 - RNA, 20 nt, synthetic construct
  misc_feature 1..20: note = Synthetic polynucleotide
  source 1..20: mol_type = other RNA
tgcatagggattttaggcgg

SEQ ID NO: 862 - RNA, 20 nt, synthetic construct
  misc_feature 1..20: note = Synthetic polynucleotide
  source 1..20: mol_type = other RNA
tgccgctgctgcagcgagtc

SEQ ID NO: 863 - RNA, 20 nt, synthetic construct
  misc_feature 1..20: note = Synthetic polynucleotide
  source 1..20: mol_type = other RNA
tgccttagacaacaacataa

SEQ ID NO: 864 - RNA, 20 nt, synthetic construct
  misc_feature 1..20: note = Synthetic polynucleotide
  source 1..20: mol_type = other RNA
tgctgtatcagccaggtgaa

SEQ ID NO: 865 - RNA, 20 nt, synthetic construct
  misc_feature 1..20: note = Synthetic polynucleotide
  source 1..20: mol_type = other RNA
tggaaaacacattctaggac

SEQ ID NO: 866 - RNA, 20 nt, synthetic construct
  misc_feature 1..20: note = Synthetic polynucleotide
  source 1..20: mol_type = other RNA
tggccagaatgtccaccgtg

SEQ ID NO: 867 - RNA, 20 nt, synthetic construct
  misc_feature 1..20: note = Synthetic polynucleotide
  source 1..20: mol_type = other RNA
tggctgccaagcttgctagg

SEQ ID NO: 868 - RNA, 20 nt, synthetic construct
  misc_feature 1..20: note = Synthetic polynucleotide
  source 1..20: mol_type = other RNA
tggggaattggcacaccagc

SEQ ID NO: 869 - RNA, 20 nt, synthetic construct
  misc_feature 1..20: note = Synthetic polynucleotide
  source 1..20: mol_type = other RNA
tgtagcatgcttttagagtt

SEQ ID NO: 870 - RNA, 20 nt, synthetic construct
  misc_feature 1..20: note = Synthetic polynucleotide
  source 1..20: mol_type = other RNA
tgtcgcgacaccacagttgg

SEQ ID NO: 871 - RNA, 20 nt, synthetic construct
  misc_feature 1..20: note = Synthetic polynucleotide
  source 1..20: mol_type = other RNA
tgtcgcgacaggtcctattg

SEQ ID NO: 872 - RNA, 20 nt, synthetic construct
  misc_feature 1..20: note = Synthetic polynucleotide
  source 1..20: mol_type = other RNA
tgtgaatttgtaaccaccca

SEQ ID NO: 873 - RNA, 20 nt, synthetic construct
  misc_feature 1..20: note = Synthetic polynucleotide
  source 1..20: mol_type = other RNA
tgttggggctccagcaatac

SEQ ID NO: 874 - RNA, 20 nt, synthetic construct
  misc_feature 1..20: note = Synthetic polynucleotide
  source 1..20: mol_type = other RNA
ttaaactctcctatacggaa

SEQ ID NO: 875 - RNA, 20 nt, synthetic construct
  misc_feature 1..20: note = Synthetic polynucleotide
  source 1..20: mol_type = other RNA
ttacactgaaagtaataatc

SEQ ID NO: 876 - RNA, 20 nt, synthetic construct
  misc_feature 1..20: note = Synthetic polynucleotide
  source 1..20: mol_type = other RNA
ttaggcggaggtaggtatat

SEQ ID NO: 877 - RNA, 20 nt, synthetic construct
  misc_feature 1..20: note = Synthetic polynucleotide
  source 1..20: mol_type = other RNA
ttcaacatatcctacaactg

SEQ ID NO: 878 - RNA, 20 nt, synthetic construct
  misc_feature 1..20: note = Synthetic polynucleotide
  source 1..20: mol_type = other RNA
ttcaaccagagatgtttcat

SEQ ID NO: 879 - RNA, 20 nt, synthetic construct
  misc_feature 1..20: note = Synthetic polynucleotide
  source 1..20: mol_type = other RNA
ttcaccaatcccttacctgg

SEQ ID NO: 880 - RNA, 20 nt, synthetic construct
  misc_feature 1..20: note = Synthetic polynucleotide
  source 1..20: mol_type = other RNA
ttccggttgtggcgcagtag

SEQ ID NO: 881 - RNA, 20 nt, synthetic construct
  misc_feature 1..20: note = Synthetic polynucleotide
  source 1..20: mol_type = other RNA
ttccgtgtggcgagggtacg

SEQ ID NO: 882 - RNA, 20 nt, synthetic construct
  misc_feature 1..20: note = Synthetic polynucleotide
  source 1..20: mol_type = other RNA
ttctacaggaatactagtaa

SEQ ID NO: 883 - RNA, 20 nt, synthetic construct
  misc_feature 1..20: note = Synthetic polynucleotide
  source 1..20: mol_type = other RNA
ttgctgcattagctctaacc

SEQ ID NO: 884 - RNA, 20 nt, synthetic construct
  misc_feature 1..20: note = Synthetic polynucleotide
  source 1..20: mol_type = other RNA
ttggactgctaacaccatag

SEQ ID NO: 885 - RNA, 20 nt, synthetic construct
  misc_feature 1..20: note = Synthetic polynucleotide
  source 1..20: mol_type = other RNA
tttcagaggcatcaactaag

SEQ ID NO: 886 - RNA, 20 nt, synthetic construct
  misc_feature 1..20: note = Synthetic polynucleotide
  source 1..20: mol_type = other RNA
tttcatatagggttggaacc

SEQ ID NO: 887 - RNA, 20 nt, synthetic construct
  misc_feature 1..20: note = Synthetic polynucleotide
  source 1..20: mol_type = other RNA
tttgcctgtactctactaga

SEQ ID NO: 888 - RNA, 20 nt, synthetic construct
  misc_feature 1..20: note = Synthetic polynucleotide
  source 1..20: mol_type = other RNA
aaaatgaggtgctctttact

SEQ ID NO: 889 - RNA, 20 nt, synthetic construct
  misc_feature 1..20: note = Synthetic polynucleotide
  source 1..20: mol_type = other RNA
aaacccctgatccccctaca

SEQ ID NO: 890 - RNA, 20 nt, synthetic construct
  misc_feature 1..20: note = Synthetic polynucleotide
  source 1..20: mol_type = other RNA
aaacggctgagagaccacag

SEQ ID NO: 891 - RNA, 20 nt, synthetic construct
  misc_feature 1..20: note = Synthetic polynucleotide
  source 1..20: mol_type = other RNA
aaagacaatgacaagggttg

SEQ ID NO: 892 - RNA, 20 nt, synthetic construct
  misc_feature 1..20: note = Synthetic polynucleotide
  source 1..20: mol_type = other RNA
aacaaatggaagacaggagg

SEQ ID NO: 893 - RNA, 20 nt, synthetic construct
  misc_feature 1..20: note = Synthetic polynucleotide
  source 1..20: mol_type = other RNA
aacaggtcctagtataagct

SEQ ID NO: 894 - RNA, 20 nt, synthetic construct
  misc_feature 1..20: note = Synthetic polynucleotide
  source 1..20: mol_type = other RNA
aagactcccttgagcccggg

SEQ ID NO: 895 - RNA, 20 nt, synthetic construct
  misc_feature 1..20: note = Synthetic polynucleotide
  source 1..20: mol_type = other RNA
aagttcgcggggaatgaaca

SEQ ID NO: 896 - RNA, 20 nt, synthetic construct
  misc_feature 1..20: note = Synthetic polynucleotide
  source 1..20: mol_type = other RNA
aatatcggcaaccctctctt

SEQ ID NO: 897 - RNA, 20 nt, synthetic construct
  misc_feature 1..20: note = Synthetic polynucleotide
  source 1..20: mol_type = other RNA
aatccgtgtaaccttgaatt

SEQ ID NO: 898 - RNA, 20 nt, synthetic construct
  misc_feature 1..20: note = Synthetic polynucleotide
  source 1..20: mol_type = other RNA
aatgacaagggttgtggagg

SEQ ID NO: 899 - RNA, 20 nt, synthetic construct
  misc_feature 1..20: note = Synthetic polynucleotide
  source 1..20: mol_type = other RNA
aatgtttccagagtagttca

SEQ ID NO: 900 - RNA, 20 nt, synthetic construct
  misc_feature 1..20: note = Synthetic polynucleotide
  source 1..20: mol_type = other RNA
acatctagggatgtgagtta

SEQ ID NO: 901 - RNA, 20 nt, synthetic construct
  misc_feature 1..20: note = Synthetic polynucleotide
  source 1..20: mol_type = other RNA
acagagtctactatactctt

SEQ ID NO: 902 - RNA, 20 nt, synthetic construct
  misc_feature 1..20: note = Synthetic polynucleotide
  source 1..20: mol_type = other RNA
accaatgggaaaagggtaca

SEQ ID NO: 903 - RNA, 20 nt, synthetic construct
  misc_feature 1..20: note = Synthetic polynucleotide
  source 1..20: mol_type = other RNA
accctcccttcttcgataat

SEQ ID NO: 904 - RNA, 20 nt, synthetic construct
  misc_feature 1..20: note = Synthetic polynucleotide
  source 1..20: mol_type = other RNA
acctgtgcccactgacccac

SEQ ID NO: 905 - RNA, 20 nt, synthetic construct
  misc_feature 1..20: note = Synthetic polynucleotide
  source 1..20: mol_type = other RNA
actacactagaaaccaccta

SEQ ID NO: 906 - RNA, 20 nt, synthetic construct
  misc_feature 1..20: note = Synthetic polynucleotide
  source 1..20: mol_type = other RNA
agactctgtggggtatgatg

SEQ ID NO: 907 - RNA, 20 nt, synthetic construct
  misc_feature 1..20: note = Synthetic polynucleotide
  source 1..20: mol_type = other RNA
agactgttggtcggaagtgt

SEQ ID NO: 908 - RNA, 20 nt, synthetic construct
  misc_feature 1..20: note = Synthetic polynucleotide
  source 1..20: mol_type = other RNA
agagcctgagtccaaaggca

SEQ ID NO: 909 - RNA, 20 nt, synthetic construct
  misc_feature 1..20: note = Synthetic polynucleotide
  source 1..20: mol_type = other RNA
agaggtatgaaacacatcta

SEQ ID NO: 910 - RNA, 20 nt, synthetic construct
  misc_feature 1..20: note = Synthetic polynucleotide
  source 1..20: mol_type = other RNA
agataactgtaaggactgtg

SEQ ID NO: 911 - RNA, 20 nt, synthetic construct
  misc_feature 1..20: note = Synthetic polynucleotide
  source 1..20: mol_type = other RNA
aggtaatgcatcctgaggac

SEQ ID NO: 912 - RNA, 20 nt, synthetic construct
  misc_feature 1..20: note = Synthetic polynucleotide
  source 1..20: mol_type = other RNA
agtctcagtcccaagcagct

SEQ ID NO: 913 - RNA, 20 nt, synthetic construct
  misc_feature 1..20: note = Synthetic polynucleotide
  source 1..20: mol_type = other RNA
agtgaaaggataaccagaat

SEQ ID NO: 914 - RNA, 20 nt, synthetic construct
  misc_feature 1..20: note = Synthetic polynucleotide
  source 1..20: mol_type = other RNA
agtgaccgacacacccacct

SEQ ID NO: 915 - RNA, 20 nt, synthetic construct
  misc_feature 1..20: note = Synthetic polynucleotide
  source 1..20: mol_type = other RNA
agttcgcggggaatgaacaa

SEQ ID NO: 916 - RNA, 20 nt, synthetic construct
  misc_feature 1..20: note = Synthetic polynucleotide
  source 1..20: mol_type = other RNA
atacccaagcttgaactccc

SEQ ID NO: 917 - RNA, 20 nt, synthetic construct
  misc_feature 1..20: note = Synthetic polynucleotide
  source 1..20: mol_type = other RNA
atcacgaacctcctgatctc

SEQ ID NO: 918 - RNA, 20 nt, synthetic construct
  misc_feature 1..20: note = Synthetic polynucleotide
  source 1..20: mol_type = other RNA
atgaagtcccacggagtcaa

SEQ ID NO: 919 - RNA, 20 nt, synthetic construct
  misc_feature 1..20: note = Synthetic polynucleotide
  source 1..20: mol_type = other RNA
atgttaaacagagaagaggc

SEQ ID NO: 920 - RNA, 20 nt, synthetic construct
  misc_feature 1..20: note = Synthetic polynucleotide
  source 1..20: mol_type = other RNA
attgcaggccctgctcccga

SEQ ID NO: 921 - RNA, 20 nt, synthetic construct
  misc_feature 1..20: note = Synthetic polynucleotide
  source 1..20: mol_type = other RNA
caaattaactataatctcaa

SEQ ID NO: 922 - RNA, 20 nt, synthetic construct
  misc_feature 1..20: note = Synthetic polynucleotide
  source 1..20: mol_type = other RNA
cacacctacaataccagctg

SEQ ID NO: 923 - RNA, 20 nt, synthetic construct
  misc_feature 1..20: note = Synthetic polynucleotide
  source 1..20: mol_type = other RNA
cacagccaatggcaccatct

SEQ ID NO: 924 - RNA, 20 nt, synthetic construct
  misc_feature 1..20: note = Synthetic polynucleotide
  source 1..20: mol_type = other RNA
caccacaaacactgccttcg

SEQ ID NO: 925 - RNA, 20 nt, synthetic construct
  misc_feature 1..20: note = Synthetic polynucleotide
  source 1..20: mol_type = other RNA
caggtagacaacaccacgcc

SEQ ID NO: 926 - RNA, 20 nt, synthetic construct
  misc_feature 1..20: note = Synthetic polynucleotide
  source 1..20: mol_type = other RNA
caggtgcgtgccctcacacc

SEQ ID NO: 927 - RNA, 20 nt, synthetic construct
  misc_feature 1..20: note = Synthetic polynucleotide
  source 1..20: mol_type = other RNA
catgccaaaaagagggaggt

SEQ ID NO: 928 - RNA, 20 nt, synthetic construct
  misc_feature 1..20: note = Synthetic polynucleotide
  source 1..20: mol_type = other RNA
catgtccgggcatgcaacaa

SEQ ID NO: 929 - RNA, 20 nt, synthetic construct
  misc_feature 1..20: note = Synthetic polynucleotide
  source 1..20: mol_type = other RNA
cattgaggggaatgttctgg

SEQ ID NO: 930 - RNA, 20 nt, synthetic construct
  misc_feature 1..20: note = Synthetic polynucleotide
  source 1..20: mol_type = other RNA
ccacaagcttagcggtccag

SEQ ID NO: 931 - RNA, 20 nt, synthetic construct
  misc_feature 1..20: note = Synthetic polynucleotide
  source 1..20: mol_type = other RNA
ccacaatgagatgccacttg

SEQ ID NO: 932 - RNA, 20 nt, synthetic construct
  misc_feature 1..20: note = Synthetic polynucleotide
  source 1..20: mol_type = other RNA
cccacttaggtgccagggaa

SEQ ID NO: 933 - RNA, 20 nt, synthetic construct
  misc_feature 1..20: note = Synthetic polynucleotide
  source 1..20: mol_type = other RNA
ccccaagtggcatctcattg

SEQ ID NO: 934 - RNA, 20 nt, synthetic construct
  misc_feature 1..20: note = Synthetic polynucleotide
  source 1..20: mol_type = other RNA
cccctccatcatgcctttgt

SEQ ID NO: 935 - RNA, 20 nt, synthetic construct
  misc_feature 1..20: note = Synthetic polynucleotide
  source 1..20: mol_type = other RNA
cccttccacttcagcctccc

SEQ ID NO: 936 - RNA, 20 nt, synthetic construct
  misc_feature 1..20: note = Synthetic polynucleotide
  source 1..20: mol_type = other RNA
ccgtacccccataccaaaat

SEQ ID NO: 937 - RNA, 20 nt, synthetic construct
  misc_feature 1..20: note = Synthetic polynucleotide
  source 1..20: mol_type = other RNA
cctcagaatctatagactgt

SEQ ID NO: 938 - RNA, 20 nt, synthetic construct
  misc_feature 1..20: note = Synthetic polynucleotide
  source 1..20: mol_type = other RNA
cctgctactgtggcatgtcc

SEQ ID NO: 939 - RNA, 20 nt, synthetic construct
  misc_feature 1..20: note = Synthetic polynucleotide
  source 1..20: mol_type = other RNA
ctaaagactcccttgagccc

SEQ ID NO: 940 - RNA, 20 nt, synthetic construct
  misc_feature 1..20: note = Synthetic polynucleotide
  source 1..20: mol_type = other RNA
ctagaaaccacctaagggta

SEQ ID NO: 941 - RNA, 20 nt, synthetic construct
  misc_feature 1..20: note = Synthetic polynucleotide
  source 1..20: mol_type = other RNA
ctcaaatcaatctccctgta

SEQ ID NO: 942 - RNA, 20 nt, synthetic construct
  misc_feature 1..20: note = Synthetic polynucleotide
  source 1..20: mol_type = other RNA
ctcaagcactgactgagctt

SEQ ID NO: 943 - RNA, 20 nt, synthetic construct
  misc_feature 1..20: note = Synthetic polynucleotide
  source 1..20: mol_type = other RNA
ctgcaattcgttccttccag

SEQ ID NO: 944 - RNA, 20 nt, synthetic construct
  misc_feature 1..20: note = Synthetic polynucleotide
  source 1..20: mol_type = other RNA
ctgcattgaggggaatgttc

SEQ ID NO: 945 - RNA, 20 nt, synthetic construct
  misc_feature 1..20: note = Synthetic polynucleotide
  source 1..20: mol_type = other RNA
cttgaaataatggccaggtg

SEQ ID NO: 946 - RNA, 20 nt, synthetic construct
  misc_feature 1..20: note = Synthetic polynucleotide
  source 1..20: mol_type = other RNA
gaaacccctgatccccctac

SEQ ID NO: 947 - RNA, 20 nt, synthetic construct
  misc_feature 1..20: note = Synthetic polynucleotide
  source 1..20: mol_type = other RNA
gacaatgacaagggttgtgg

SEQ ID NO: 948 - RNA, 20 nt, synthetic construct
  misc_feature 1..20: note = Synthetic polynucleotide
  source 1..20: mol_type = other RNA
gacgttgtgaggctgagact

SEQ ID NO: 949 - RNA, 20 nt, synthetic construct
  misc_feature 1..20: note = Synthetic polynucleotide
  source 1..20: mol_type = other RNA
gagaaaggcatgcatgctat

SEQ ID NO: 950 - RNA, 20 nt, synthetic construct
  misc_feature 1..20: note = Synthetic polynucleotide
  source 1..20: mol_type = other RNA
gagatagggttttcaccacg

SEQ ID NO: 951 - RNA, 20 nt, synthetic construct
  misc_feature 1..20: note = Synthetic polynucleotide
  source 1..20: mol_type = other RNA
gagcaatcctgcagcaacaa

SEQ ID NO: 952 - RNA, 20 nt, synthetic construct
  misc_feature 1..20: note = Synthetic polynucleotide
  source 1..20: mol_type = other RNA
gaggtgtgcaacaccacatt

SEQ ID NO: 953 - RNA, 20 nt, synthetic construct
  misc_feature 1..20: note = Synthetic polynucleotide
  source 1..20: mol_type = other RNA
gagtgttgggagagaatttg

SEQ ID NO: 954 - RNA, 20 nt, synthetic construct
  misc_feature 1..20: note = Synthetic polynucleotide
  source 1..20: mol_type = other RNA
gagttggtgtctgcattgag

SEQ ID NO: 955 - RNA, 20 nt, synthetic construct
  misc_feature 1..20: note = Synthetic polynucleotide
  source 1..20: mol_type = other RNA
gatcagtgctacattatggt

SEQ ID NO: 956 - RNA, 20 nt, synthetic construct
  misc_feature 1..20: note = Synthetic polynucleotide
  source 1..20: mol_type = other RNA
gcaacctattcctaagggat

SEQ ID NO: 957 - RNA, 20 nt, synthetic construct
  misc_feature 1..20: note = Synthetic polynucleotide
  source 1..20: mol_type = other RNA
gcactttgggaaagaaacca

SEQ ID NO: 958 - RNA, 20 nt, synthetic construct
  misc_feature 1..20: note = Synthetic polynucleotide
  source 1..20: mol_type = other RNA
gcctgtactaacaggcactt

SEQ ID NO: 959 - RNA, 20 nt, synthetic construct
  misc_feature 1..20: note = Synthetic polynucleotide
  source 1..20: mol_type = other RNA
gcgaggctgtgggggttgaa

SEQ ID NO: 960 - RNA, 20 nt, synthetic construct
  misc_feature 1..20: note = Synthetic polynucleotide
  source 1..20: mol_type = other RNA
gctattcaatcctagttatg

SEQ ID NO: 961 - RNA, 20 nt, synthetic construct
  misc_feature 1..20: note = Synthetic polynucleotide
  source 1..20: mol_type = other RNA
ggactagggattagagtaac

SEQ ID NO: 962 - RNA, 20 nt, synthetic construct
  misc_feature 1..20: note = Synthetic polynucleotide
  source 1..20: mol_type = other RNA
ggaggcagaggtcgcggtga

SEQ ID NO: 963 - RNA, 20 nt, synthetic construct
  misc_feature 1..20: note = Synthetic polynucleotide
  source 1..20: mol_type = other RNA
ggagggatgcactgatacgg

SEQ ID NO: 964 - RNA, 20 nt, synthetic construct
  misc_feature 1..20: note = Synthetic polynucleotide
  source 1..20: mol_type = other RNA
ggagttggtgtctgcattga

SEQ ID NO: 965 - RNA, 20 nt, synthetic construct
  misc_feature 1..20: note = Synthetic polynucleotide
  source 1..20: mol_type = other RNA
ggattcagtcaaggtgtcag

SEQ ID NO: 966 - RNA, 20 nt, synthetic construct
  misc_feature 1..20: note = Synthetic polynucleotide
  source 1..20: mol_type = other RNA
gggaaagaaaccaaggcggg

SEQ ID NO: 967 - RNA, 20 nt, synthetic construct
  misc_feature 1..20: note = Synthetic polynucleotide
  source 1..20: mol_type = other RNA
gggtagggggtcggaaagtg

SEQ ID NO: 968 - RNA, 20 nt, synthetic construct
  misc_feature 1..20: note = Synthetic polynucleotide
  source 1..20: mol_type = other RNA
ggtgatatacgctaatgtgc

SEQ ID NO: 969 - RNA, 20 nt, synthetic construct
  misc_feature 1..20: note = Synthetic polynucleotide
  source 1..20: mol_type = other RNA
ggttttgagcaagccctcct

SEQ ID NO: 970 - RNA, 20 nt, synthetic construct
  misc_feature 1..20: note = Synthetic polynucleotide
  source 1..20: mol_type = other RNA
gtaggtcatatggtaacttc

SEQ ID NO: 971 - RNA, 20 nt, synthetic construct
  misc_feature 1..20: note = Synthetic polynucleotide
  source 1..20: mol_type = other RNA
gtcctccaaacacatacaag

SEQ ID NO: 972 - RNA, 20 nt, synthetic construct
  misc_feature 1..20: note = Synthetic polynucleotide
  source 1..20: mol_type = other RNA
gtgaaacagcacagccacag

SEQ ID NO: 973 - RNA, 20 nt, synthetic construct
  misc_feature 1..20: note = Synthetic polynucleotide
  source 1..20: mol_type = other RNA
gtgagtggaggttgactaaa

SEQ ID NO: 974 - RNA, 20 nt, synthetic construct
  misc_feature 1..20: note = Synthetic polynucleotide
  source 1..20: mol_type = other RNA
gtgataccactgcatgtcat

SEQ ID NO: 975 - RNA, 20 nt, synthetic construct
  misc_feature 1..20: note = Synthetic polynucleotide
  source 1..20: mol_type = other RNA
gtgggacttcatcgccccca

SEQ ID NO: 976 - RNA, 20 nt, synthetic construct
  misc_feature 1..20: note = Synthetic polynucleotide
  source 1..20: mol_type = other RNA
gttttgctccatcacccagg

SEQ ID NO: 977 - RNA, 20 nt, synthetic construct
  misc_feature 1..20: note = Synthetic polynucleotide
  source 1..20: mol_type = other RNA
tacaatgttaaacagagaag

SEQ ID NO: 978 - RNA, 20 nt, synthetic construct
  misc_feature 1..20: note = Synthetic polynucleotide
  source 1..20: mol_type = other RNA
tacctcaagcctgtactaac

SEQ ID NO: 979 - RNA, 20 nt, synthetic construct
  misc_feature 1..20: note = Synthetic polynucleotide
  source 1..20: mol_type = other RNA
tactgatcagtgctacatta

SEQ ID NO: 980 - RNA, 20 nt, synthetic construct
  misc_feature 1..20: note = Synthetic polynucleotide
  source 1..20: mol_type = other RNA
tagcaacctatgacatgcag

SEQ ID NO: 981 - RNA, 20 nt, synthetic construct
  misc_feature 1..20: note = Synthetic polynucleotide
  source 1..20: mol_type = other RNA
taggatcacacctgagttct

SEQ ID NO: 982 - RNA, 20 nt, synthetic construct
  misc_feature 1..20: note = Synthetic polynucleotide
  source 1..20: mol_type = other RNA
tcaaaagagcctgagtccaa

SEQ ID NO: 983 - RNA, 20 nt, synthetic construct
  misc_feature 1..20: note = Synthetic polynucleotide
  source 1..20: mol_type = other RNA
tcctacaaaggcatgatgga

SEQ ID NO: 984 - RNA, 20 nt, synthetic construct
  misc_feature 1..20: note = Synthetic polynucleotide
  source 1..20: mol_type = other RNA
tgatcagtgctacattatgg

SEQ ID NO: 985 - RNA, 20 nt, synthetic construct
  misc_feature 1..20: note = Synthetic polynucleotide
  source 1..20: mol_type = other RNA
tgctgactgtcatgcgttgt

SEQ ID NO: 986 - RNA, 20 nt, synthetic construct
  misc_feature 1..20: note = Synthetic polynucleotide
  source 1..20: mol_type = other RNA
tggcagtcaagataactgta

SEQ ID NO: 987 - RNA, 20 nt, synthetic construct
  misc_feature 1..20: note = Synthetic polynucleotide
  source 1..20: mol_type = other RNA
tgggtagggggtcggaaagt

SEQ ID NO: 988 - RNA, 20 nt, synthetic construct
  misc_feature 1..20: note = Synthetic polynucleotide
  source 1..20: mol_type = other RNA
tggtattagtcaagatagtg

SEQ ID NO: 989 - RNA, 20 nt, synthetic construct
  misc_feature 1..20: note = Synthetic polynucleotide
  source 1..20: mol_type = other RNA
tgtacctatcccttaggaat

SEQ ID NO: 990 - RNA, 20 nt, synthetic construct
  misc_feature 1..20: note = Synthetic polynucleotide
  source 1..20: mol_type = other RNA
tgttaaacagagaagaggct

SEQ ID NO: 991 - RNA, 20 nt, synthetic construct
  misc_feature 1..20: note = Synthetic polynucleotide
  source 1..20: mol_type = other RNA
ttcctacaaaggcatgatgg

SEQ ID NO: 992 - RNA, 20 nt, synthetic construct
  misc_feature 1..20: note = Synthetic polynucleotide
  source 1..20: mol_type = other RNA
ttgagtgttcaatctccctt

SEQ ID NO: 993 - RNA, 20 nt, synthetic construct
  misc_feature 1..20: note = Synthetic polynucleotide
  source 1..20: mol_type = other RNA
ttgggagagaatttgaggca

SEQ ID NO: 994 - RNA, 20 nt, synthetic construct
  misc_feature 1..20: note = Synthetic polynucleotide
  source 1..20: mol_type = other RNA
tttaggtctaagatccacct

SEQ ID NO: 995 - RNA, 20 nt, synthetic construct
  misc_feature 1..20: note = Synthetic polynucleotide
  source 1..20: mol_type = other RNA
tttgggaaagaaaccaaggc

SEQ ID NO: 996 - RNA, 20 nt, synthetic construct
  misc_feature 1..20: note = Synthetic polynucleotide
  source 1..20: mol_type = other RNA
acaccaatctctttagtgct

SEQ ID NO: 997 - RNA, 20 nt, synthetic construct
  misc_feature 1..20: note = Synthetic polynucleotide
  source 1..20: mol_type = other RNA
actacagaggcacgcatcca

SEQ ID NO: 998 - RNA, 20 nt, synthetic construct
  misc_feature 1..20: note = Synthetic polynucleotide
  source 1..20: mol_type = other RNA
agtatataggtggccttaca

SEQ ID NO: 999 - RNA, 20 nt, synthetic construct
  misc_feature 1..20: note = Synthetic polynucleotide
  source 1..20: mol_type = other RNA
atcatgtgcagggcttttac

SEQ ID NO: 1000 - RNA, 20 nt, synthetic construct
  misc_feature 1..20: note = Synthetic polynucleotide
  source 1..20: mol_type = other RNA
caattgttaagcagaatctc

SEQ ID NO: 1001 - RNA, 20 nt, synthetic construct
  misc_feature 1..20: note = Synthetic polynucleotide
  source 1..20: mol_type = other RNA
cacaatgctagcaggagttg

SEQ ID NO: 1002 - RNA, 20 nt, synthetic construct
  misc_feature 1..20: note = Synthetic polynucleotide
  source 1..20: mol_type = other RNA
cactcaacaatttctatcct

SEQ ID NO: 1003 - RNA, 20 nt, synthetic construct
  misc_feature 1..20: note = Synthetic polynucleotide
  source 1..20: mol_type = other RNA
caggtaaagtactttggttg

SEQ ID NO: 1004 - RNA, 20 nt, synthetic construct
  misc_feature 1..20: note = Synthetic polynucleotide
  source 1..20: mol_type = other RNA
caggtaccaagaggcagact

SEQ ID NO: 1005 - RNA, 20 nt, synthetic construct
  misc_feature 1..20: note = Synthetic polynucleotide
  source 1..20: mol_type = other RNA
cagtccagacttcttggcgt

SEQ ID NO: 1006 - RNA, 20 nt, synthetic construct
  misc_feature 1..20: note = Synthetic polynucleotide
  source 1..20: mol_type = other RNA
ccaagggactggcggagccc

SEQ ID NO: 1007 - RNA, 20 nt, synthetic construct
  misc_feature 1..20: note = Synthetic polynucleotide
  source 1..20: mol_type = other RNA
cccgggcgccgaggaccctg

SEQ ID NO: 1008 - RNA, 20 nt, synthetic construct
  misc_feature 1..20: note = Synthetic polynucleotide
  source 1..20: mol_type = other RNA
cgaagaaattaacagaagag

SEQ ID NO: 1009 - RNA, 20 nt, synthetic construct
  misc_feature 1..20: note = Synthetic polynucleotide
  source 1..20: mol_type = other RNA
cggcattctggggatgaatc

SEQ ID NO: 1010 - RNA, 20 nt, synthetic construct
  misc_feature 1..20: note = Synthetic polynucleotide
  source 1..20: mol_type = other RNA
cggccgcggcgcaagacggg

SEQ ID NO: 1011 - RNA, 20 nt, synthetic construct
  misc_feature 1..20: note = Synthetic polynucleotide
  source 1..20: mol_type = other RNA
ctgccacgctgtgactcaga

SEQ ID NO: 1012 - RNA, 20 nt, synthetic construct
  misc_feature 1..20: note = Synthetic polynucleotide
  source 1..20: mol_type = other RNA
ctgtgactcagacggcattc

SEQ ID NO: 1013 - RNA, 20 nt, synthetic construct
  misc_feature 1..20: note = Synthetic polynucleotide
  source 1..20: mol_type = other RNA
gaactgtatccaccctcagc

SEQ ID NO: 1014 - RNA, 20 nt, synthetic construct
  misc_feature 1..20: note = Synthetic polynucleotide
  source 1..20: mol_type = other RNA
gaagtagttccagagcagta

SEQ ID NO: 1015 - RNA, 20 nt, synthetic construct
  misc_feature 1..20: note = Synthetic polynucleotide
  source 1..20: mol_type = other RNA
gatgtgatctttgggccctt

SEQ ID NO: 1016 - RNA, 20 nt, synthetic construct
  misc_feature 1..20: note = Synthetic polynucleotide
  source 1..20: mol_type = other RNA
gcacaaccacttaaaccccc

SEQ ID NO: 1017 - RNA, 20 nt, synthetic construct
  misc_feature 1..20: note = Synthetic polynucleotide
  source 1..20: mol_type = other RNA
gcagtatgggaagaaatcac

SEQ ID NO: 1018 - RNA, 20 nt, synthetic construct
  misc_feature 1..20: note = Synthetic polynucleotide
  source 1..20: mol_type = other RNA
gccttgatatgtaatgagca

SEQ ID NO: 1019 - RNA, 20 nt, synthetic construct
  misc_feature 1..20: note = Synthetic polynucleotide
  source 1..20: mol_type = other RNA
ggataaaatacttttggaag

SEQ ID NO: 1020 - RNA, 20 nt, synthetic construct
  misc_feature 1..20: note = Synthetic polynucleotide
  source 1..20: mol_type = other RNA
ggcagggcgccccgggaact

SEQ ID NO: 1021 - RNA, 20 nt, synthetic construct
  misc_feature 1..20: note = Synthetic polynucleotide
  source 1..20: mol_type = other RNA
gtgacattcacaaccactcc

SEQ ID NO: 1022 - RNA, 20 nt, synthetic construct
  misc_feature 1..20: note = Synthetic polynucleotide
  source 1..20: mol_type = other RNA
gtgactcagacggcattctg

SEQ ID NO: 1023 - RNA, 20 nt, synthetic construct
  misc_feature 1..20: note = Synthetic polynucleotide
  source 1..20: mol_type = other RNA
gttccataaccaattcaaac

SEQ ID NO: 1024 - RNA, 20 nt, synthetic construct
  misc_feature 1..20: note = Synthetic polynucleotide
  source 1..20: mol_type = other RNA
gttgggatatggttgccatt

SEQ ID NO: 1025 - RNA, 20 nt, synthetic construct
  misc_feature 1..20: note = Synthetic polynucleotide
  source 1..20: mol_type = other RNA
taccgtatgaagggatccac

SEQ ID NO: 1026 - RNA, 20 nt, synthetic construct
  misc_feature 1..20: note = Synthetic polynucleotide
  source 1..20: mol_type = other RNA
tacctgtgtagtgcacatgg

SEQ ID NO: 1027 - RNA, 20 nt, synthetic construct
  misc_feature 1..20: note = Synthetic polynucleotide
  source 1..20: mol_type = other RNA
tactaccccacggtttgtag

SEQ ID NO: 1028 - RNA, 20 nt, synthetic construct
  misc_feature 1..20: note = Synthetic polynucleotide
  source 1..20: mol_type = other RNA
tagtaacatactccgcgcat

SEQ ID NO: 1029 - RNA, 20 nt, synthetic construct
  misc_feature 1..20: note = Synthetic polynucleotide
  source 1..20: mol_type = other RNA
tcactcatgccaaaatctaa

SEQ ID NO: 1030 - RNA, 20 nt, synthetic construct
  misc_feature 1..20: note = Synthetic polynucleotide
  source 1..20: mol_type = other RNA
tcatgacccgggggtttaag

SEQ ID NO: 1031 - RNA, 20 nt, synthetic construct
  misc_feature 1..20: note = Synthetic polynucleotide
  source 1..20: mol_type = other RNA
tccatatattcctgcagggt

SEQ ID NO: 1032 - RNA, 20 nt, synthetic construct
  misc_feature 1..20: note = Synthetic polynucleotide
  source 1..20: mol_type = other RNA
tcgagcctgcgctccctccg

SEQ ID NO: 1033 - RNA, 20 nt, synthetic construct
  misc_feature 1..20: note = Synthetic polynucleotide
  source 1..20: mol_type = other RNA
tcggcgcgcctgcacagcgc

SEQ ID NO: 1034 - RNA, 20 nt, synthetic construct
  misc_feature 1..20: note = Synthetic polynucleotide
  source 1..20: mol_type = other RNA
tctagcagaaacgcaagttc

SEQ ID NO: 1035 - RNA, 20 nt, synthetic construct
  misc_feature 1..20: note = Synthetic polynucleotide
  source 1..20: mol_type = other RNA
tctggactatggctctacag

SEQ ID NO: 1036 - RNA, 20 nt, synthetic construct
  misc_feature 1..20: note = Synthetic polynucleotide
  source 1..20: mol_type = other RNA
tgtgactcagacggcattct

SEQ ID NO: 1037 - RNA, 20 nt, synthetic construct
  misc_feature 1..20: note = Synthetic polynucleotide
  source 1..20: mol_type = other RNA
ttacctttaactcatgtaac

SEQ ID NO: 1038 - RNA, 20 nt, synthetic construct
  misc_feature 1..20: note = Synthetic polynucleotide
  source 1..20: mol_type = other RNA
ttgtcacttggtgataccac

SEQ ID NO: 1039 - RNA, 20 nt, synthetic construct
  misc_feature 1..20: note = Synthetic polynucleotide
  source 1..20: mol_type = other RNA
acactctctagcacagtata

SEQ ID NO: 1040 - RNA, 20 nt, synthetic construct
  misc_feature 1..20: note = Synthetic polynucleotide
  source 1..20: mol_type = other RNA
atacatctctgccttttaag

SEQ ID NO: 1041 - RNA, 20 nt, synthetic construct
  misc_feature 1..20: note = Synthetic polynucleotide
  source 1..20: mol_type = other RNA
atattatattcatgtagtgc

SEQ ID NO: 1042 - RNA, 20 nt, synthetic construct
  misc_feature 1..20: note = Synthetic polynucleotide
  source 1..20: mol_type = other RNA
cagctgaaggtacatcacat

SEQ ID NO: 1043 - RNA, 20 nt, synthetic construct
  misc_feature 1..20: note = Synthetic polynucleotide
  source 1..20: mol_type = other RNA
cttgtttttcattatgaaac

SEQ ID NO: 1044 - RNA, 20 nt, synthetic construct
  misc_feature 1..20: note = Synthetic polynucleotide
  source 1..20: mol_type = other RNA
gagataatacttaatcgctg

SEQ ID NO: 1045 - RNA, 20 nt, synthetic construct
  misc_feature 1..20: note = Synthetic polynucleotide
  source 1..20: mol_type = other RNA
gagcacattttctatgctct

SEQ ID NO: 1046 - RNA, 20 nt, synthetic construct
  misc_feature 1..20: note = Synthetic polynucleotide
  source 1..20: mol_type = other RNA
tactgattttttctgcttgg

SEQ ID NO: 1047 - RNA, 20 nt, synthetic construct
  misc_feature 1..20: note = Synthetic polynucleotide
  source 1..20: mol_type = other RNA
tggggcactgcagcacatgt

SEQ ID NO: 1048 - RNA, 20 nt, synthetic construct
  misc_feature 1..20: note = Synthetic polynucleotide
  source 1..20: mol_type = other RNA
tttcggtacttaacagatgt

SEQ ID NO: 1049 - RNA, 20 nt, synthetic construct
  misc_feature 1..20: note = Synthetic polynucleotide
  source 1..20: mol_type = other RNA
gcctacagggtatctctcct

SEQ ID NO: 1050 - RNA, 20 nt, synthetic construct
  misc_feature 1..20: note = Synthetic polynucleotide
  source 1..20: mol_type = other RNA
atcatacaggagtgcctaca

SEQ ID NO: 1051 - RNA, 20 nt, synthetic construct
  misc_feature 1..20: note = Synthetic polynucleotide
  source 1..20: mol_type = other RNA
ggtcggcttcaggagggaag

SEQ ID NO: 1052 - RNA, 20 nt, synthetic construct
  misc_feature 1..20: note = Synthetic polynucleotide
  source 1..20: mol_type = other RNA
ctaagcagtggactaaggat

SEQ ID NO: 1053 - RNA, 20 nt, synthetic construct
  misc_feature 1..20: note = Synthetic polynucleotide
  source 1..20: mol_type = other RNA
gtttcaggcctggactgggt

SEQ ID NO: 1054 - RNA, 20 nt, synthetic construct
  misc_feature 1..20: note = Synthetic polynucleotide
  source 1..20: mol_type = other RNA
gcagctcagaaagtgatgca

SEQ ID NO: 1055 - RNA, 20 nt, synthetic construct
  misc_feature 1..20: note = Synthetic polynucleotide
  source 1..20: mol_type = other RNA
acagttcagggcatgagata

SEQ ID NO: 1056 - RNA, 20 nt, synthetic construct
  misc_feature 1..20: note = Synthetic polynucleotide
  source 1..20: mol_type = other RNA
gggcatgagataagggcagt

SEQ ID NO: 1057 - RNA, 20 nt, synthetic construct
  misc_feature 1..20: note = Synthetic polynucleotide
  source 1..20: mol_type = other RNA
gcgcactgcagcgcagacca

SEQ ID NO: 1058 - RNA, 20 nt, synthetic construct
  misc_feature 1..20: note = Synthetic polynucleotide
  source 1..20: mol_type = other RNA
gccaggttactgattcatag

SEQ ID NO: 1059 - RNA, 20 nt, synthetic construct
  misc_feature 1..20: note = Synthetic polynucleotide
  source 1..20: mol_type = other RNA
gtggataggtgcgttcaagg

SEQ ID NO: 1060 - RNA, 20 nt, synthetic construct
  misc_feature 1..20: note = Synthetic polynucleotide
  source 1..20: mol_type = other RNA
tgagctcagagccttctgtg

SEQ ID NO: 1061 - RNA, 20 nt, synthetic construct
  misc_feature 1..20: note = Synthetic polynucleotide
  source 1..20: mol_type = other RNA
ccatagctgaggcctttatt

SEQ ID NO: 1062 - RNA, 20 nt, synthetic construct
  misc_feature 1..20: note = Synthetic polynucleotide
  source 1..20: mol_type = other RNA
aaaaccaggcaaccataatg

SEQ ID NO: 1063 - RNA, 20 nt, synthetic construct
  misc_feature 1..20: note = Synthetic polynucleotide
  source 1..20: mol_type = other RNA
tcctgcgccgacctcgaatg

SEQ ID NO: 1064 - RNA, 20 nt, synthetic construct
  misc_feature 1..20: note = Synthetic polynucleotide
  source 1..20: mol_type = other RNA
cagcaggaggaccgcattcg

SEQ ID NO: 1065 - RNA, 20 nt, synthetic construct
  misc_feature 1..20: note = Synthetic polynucleotide
  source 1..20: mol_type = other RNA
gagccttctgtgtggtttgc

SEQ ID NO: 1066 - RNA, 20 nt, synthetic construct
  misc_feature 1..20: note = Synthetic polynucleotide
  source 1..20: mol_type = other RNA
agccttctgtgtggtttgcg

SEQ ID NO: 1067 - RNA, 20 nt, synthetic construct
  misc_feature 1..20: note = Synthetic polynucleotide
  source 1..20: mol_type = other RNA
gccttctgtgtggtttgcgg

SEQ ID NO: 1068 - RNA, 20 nt, synthetic construct
  misc_feature 1..20: note = Synthetic polynucleotide
  source 1..20: mol_type = other RNA
gcccccgcaaaccacacaga

SEQ ID NO: 1069 - RNA, 20 nt, synthetic construct
  misc_feature 1..20: note = Synthetic polynucleotide
  source 1..20: mol_type = other RNA
aagcaatatgaaatgttacc

SEQ ID NO: 1070 - RNA, 20 nt, synthetic construct
  misc_feature 1..20: note = Synthetic polynucleotide
  source 1..20: mol_type = other RNA
tatgacgacactcatttgca

SEQ ID NO: 1071 - RNA, 20 nt, synthetic construct
  misc_feature 1..20: note = Synthetic polynucleotide
  source 1..20: mol_type = other RNA
gttgggctacctttatcctt

SEQ ID NO: 1072 - RNA, 20 nt, synthetic construct
  misc_feature 1..20: note = Synthetic polynucleotide
  source 1..20: mol_type = other RNA
gccatcttgcaacaatccca

SEQ ID NO: 1073 - RNA, 20 nt, synthetic construct
  misc_feature 1..20: note = Synthetic polynucleotide
  source 1..20: mol_type = other RNA
gttagtctatgcatgggtat

SEQ ID NO: 1074 - RNA, 20 nt, synthetic construct
  misc_feature 1..20: note = Synthetic polynucleotide
  source 1..20: mol_type = other RNA
tgatagagcagcgtggccca

SEQ ID NO: 1075 - RNA, 20 nt, synthetic construct
  misc_feature 1..20: note = Synthetic polynucleotide
  source 1..20: mol_type = other RNA
gctaagcagtggactaagga

SEQ ID NO: 1076 - RNA, 20 nt, synthetic construct
  misc_feature 1..20: note = Synthetic polynucleotide
  source 1..20: mol_type = other RNA
tcagatgttaaaggccaatg

SEQ ID NO: 1077 - RNA, 20 nt, synthetic construct
  misc_feature 1..20: note = Synthetic polynucleotide
  source 1..20: mol_type = other RNA
gctgcccttgggagcccaga

SEQ ID NO: 1078 - RNA, 20 nt, synthetic construct
  misc_feature 1..20: note = Synthetic polynucleotide
  source 1..20: mol_type = other RNA
ggcaagtttcaggcctggac

SEQ ID NO: 1079 - RNA, 20 nt, synthetic construct
  misc_feature 1..20: note = Synthetic polynucleotide
  source 1..20: mol_type = other RNA
gcaagtttcaggcctggact

SEQ ID NO: 1080 - RNA, 20 nt, synthetic construct
  misc_feature 1..20: note = Synthetic polynucleotide
  source 1..20: mol_type = other RNA
agtttcaggcctggactggg

SEQ ID NO: 1081 - RNA, 20 nt, synthetic construct
  misc_feature 1..20: note = Synthetic polynucleotide
  source 1..20: mol_type = other RNA
gctttccctgccctgtttgc

SEQ ID NO: 1082 - RNA, 20 nt, synthetic construct
  misc_feature 1..20: note = Synthetic polynucleotide
  source 1..20: mol_type = other RNA
accatgcagggactgggcat

SEQ ID NO: 1083 - RNA, 20 nt, synthetic construct
  misc_feature 1..20: note = Synthetic polynucleotide
  source 1..20: mol_type = other RNA
ccatgcagggactgggcatg

SEQ ID NO: 1084 - RNA, 20 nt, synthetic construct
  misc_feature 1..20: note = Synthetic polynucleotide
  source 1..20: mol_type = other RNA
gcatcactttctgagctgcc

SEQ ID NO: 1085 - RNA, 20 nt, synthetic construct
  misc_feature 1..20: note = Synthetic polynucleotide
  source 1..20: mol_type = other RNA
ggcagctcagaaagtgatgc

SEQ ID NO: 1086 - RNA, 20 nt, synthetic construct
  misc_feature 1..20: note = Synthetic polynucleotide
  source 1..20: mol_type = other RNA
gatgcaggggccgctctctg

SEQ ID NO: 1087 - RNA, 20 nt, synthetic construct
  misc_feature 1..20: note = Synthetic polynucleotide
  source 1..20: mol_type = other RNA
tcagaagacctcatggattg

SEQ ID NO: 1088 - RNA, 20 nt, synthetic construct
  misc_feature 1..20: note = Synthetic polynucleotide
  source 1..20: mol_type = other RNA
ggaccattagcattgccagg

SEQ ID NO: 1089 - RNA, 20 nt, synthetic construct
  misc_feature 1..20: note = Synthetic polynucleotide
  source 1..20: mol_type = other RNA
gaccattagcattgccagga

SEQ ID NO: 1090 - RNA, 20 nt, synthetic construct
  misc_feature 1..20: note = Synthetic polynucleotide
  source 1..20: mol_type = other RNA
accattagcattgccaggag

SEQ ID NO: 1091 - RNA, 20 nt, synthetic construct
  misc_feature 1..20: note = Synthetic polynucleotide
  source 1..20: mol_type = other RNA
atgtggtgcatctcgatgag

SEQ ID NO: 1092 - RNA, 20 nt, synthetic construct
  misc_feature 1..20: note = Synthetic polynucleotide
  source 1..20: mol_type = other RNA
cctcatcccctaccaccctt

SEQ ID NO: 1093 - RNA, 20 nt, synthetic construct
  misc_feature 1..20: note = Synthetic polynucleotide
  source 1..20: mol_type = other RNA
ctagggcctaagggtggtag

SEQ ID NO: 1094 - RNA, 20 nt, synthetic construct
  misc_feature 1..20: note = Synthetic polynucleotide
  source 1..20: mol_type = other RNA
actagggcctaagggtggta

SEQ ID NO: 1095 - RNA, 20 nt, synthetic construct
  misc_feature 1..20: note = Synthetic polynucleotide
  source 1..20: mol_type = other RNA
tgagtactagggcctaaggg

SEQ ID NO: 1096 - RNA, 20 nt, synthetic construct
  misc_feature 1..20: note = Synthetic polynucleotide
  source 1..20: mol_type = other RNA
atagtcaatgaaatctccca

SEQ ID NO: 1097 - RNA, 20 nt, synthetic construct
  misc_feature 1..20: note = Synthetic polynucleotide
  source 1..20: mol_type = other RNA
agagaaagacgagatggcac

SEQ ID NO: 1098 - RNA, 20 nt, synthetic construct
  misc_feature 1..20: note = Synthetic polynucleotide
  source 1..20: mol_type = other RNA
ataaagggcctgagcagggg

SEQ ID NO: 1099 - RNA, 20 nt, synthetic construct
  misc_feature 1..20: note = Synthetic polynucleotide
  source 1..20: mol_type = other RNA
ctaatttcctcattgaaggt

SEQ ID NO: 1100 - RNA, 20 nt, synthetic construct
  misc_feature 1..20: note = Synthetic polynucleotide
  source 1..20: mol_type = other RNA
aaaaaggctgcccgctgcgg

SEQ ID NO: 1101 - RNA, 20 nt, synthetic construct
  misc_feature 1..20: note = Synthetic polynucleotide
  source 1..20: mol_type = other RNA
atttagaagacgatgatgag

SEQ ID NO: 1102 - RNA, 20 nt, synthetic construct
  misc_feature 1..20: note = Synthetic polynucleotide
  source 1..20: mol_type = other RNA
tctgtattaataatgctgcc

SEQ ID NO: 1103 - RNA, 20 nt, synthetic construct
  misc_feature 1..20: note = Synthetic polynucleotide
  source 1..20: mol_type = other RNA
tttagacgctgatgtagctt

SEQ ID NO: 1104 - RNA, 20 nt, synthetic construct
  misc_feature 1..20: note = Synthetic polynucleotide
  source 1..20: mol_type = other RNA
agtccctaatatggctagtc

SEQ ID NO: 1105 - RNA, 20 nt, synthetic construct
  misc_feature 1..20: note = Synthetic polynucleotide
  source 1..20: mol_type = other RNA
cagccaggttactgattcat

SEQ ID NO: 1106 - RNA, 20 nt, synthetic construct
  misc_feature 1..20: note = Synthetic polynucleotide
  source 1..20: mol_type = other RNA
acccctatgaatcagtaacc

SEQ ID NO: 1107 - RNA, 20 nt, synthetic construct
  misc_feature 1..20: note = Synthetic polynucleotide
  source 1..20: mol_type = other RNA
actagtattcctgtagaaga

SEQ ID NO: 1108 - RNA, 20 nt, synthetic construct
  misc_feature 1..20: note = Synthetic polynucleotide
  source 1..20: mol_type = other RNA
gtaaggctgatttgggcaaa

SEQ ID NO: 1109 - RNA, 20 nt, synthetic construct
  misc_feature 1..20: note = Synthetic polynucleotide
  source 1..20: mol_type = other RNA
gaacctgaggttagcagcaa

SEQ ID NO: 1110 - RNA, 20 nt, synthetic construct
  misc_feature 1..20: note = Synthetic polynucleotide
  source 1..20: mol_type = other RNA
ttatgcaagcatgtgttttt

SEQ ID NO: 1111 - RNA, 20 nt, synthetic construct
  misc_feature 1..20: note = Synthetic polynucleotide
  source 1..20: mol_type = other RNA
caacagaattttgtcaaaat

SEQ ID NO: 1112 - RNA, 20 nt, synthetic construct
  misc_feature 1..20: note = Synthetic polynucleotide
  source 1..20: mol_type = other RNA
ggaccagtaaaataattatt

SEQ ID NO: 1113 - RNA, 20 nt, synthetic construct
  misc_feature 1..20: note = Synthetic polynucleotide
  source 1..20: mol_type = other RNA
gcatccttgcatagaggacc

SEQ ID NO: 1114 - RNA, 20 nt, synthetic construct
  misc_feature 1..20: note = Synthetic polynucleotide
  source 1..20: mol_type = other RNA
gatgacaggttggccattgg

SEQ ID NO: 1115 - RNA, 20 nt, synthetic construct
  misc_feature 1..20: note = Synthetic polynucleotide
  source 1..20: mol_type = other RNA
cattgacgtgggttgcacca

SEQ ID NO: 1116 - RNA, 20 nt, synthetic construct
  misc_feature 1..20: note = Synthetic polynucleotide
  source 1..20: mol_type = other RNA
gtacaaattgacgacacacc

SEQ ID NO: 1117 - RNA, 20 nt, synthetic construct
  misc_feature 1..20: note = Synthetic polynucleotide
  source 1..20: mol_type = other RNA
ggactctatttgtgaggcca

SEQ ID NO: 1118 - RNA, 20 nt, synthetic construct
  misc_feature 1..20: note = Synthetic polynucleotide
  source 1..20: mol_type = other RNA
acgtgcagcatatgtggcgt

SEQ ID NO: 1119 - RNA, 20 nt, synthetic construct
  misc_feature 1..20: note = Synthetic polynucleotide
  source 1..20: mol_type = other RNA
cagtgtttcatatctagact

SEQ ID NO: 1120 - RNA, 20 nt, synthetic construct
  misc_feature 1..20: note = Synthetic polynucleotide
  source 1..20: mol_type = other RNA
agtcggcctgccctgaaggg

SEQ ID NO: 1121 - RNA, 20 nt, synthetic construct
  misc_feature 1..20: note = Synthetic polynucleotide
  source 1..20: mol_type = other RNA
acgctcctggcagagggcta

SEQ ID NO: 1122 - RNA, 20 nt, synthetic construct
  misc_feature 1..20: note = Synthetic polynucleotide
  source 1..20: mol_type = other RNA
ctactttagattctattgta

SEQ ID NO: 1123 - DNA, 6136 bp, synthetic construct
  misc_feature 1..6136: note = Synthetic polynucleotide
  source 1..6136: mol_type = other DNA
acattttactagtttattttgttgttcaaaattttctactcttggctattggaaggtcttttaattggctactatatcattttcgtatacacactcctagtataatggcatgaatccgtttatgaggctaaagccctcaaggcctaattaccttttaacagccccaccttttaatactgctacagtggcagttagtttccactaactgtaggggacaaaaattcaaaccatagcaagaacataccaaaaccatttttaaaaacaataatgcatttatttctgcaaaaaatggccataaagggccacctttatatgtgatcatgtagatcaccctctatatgataaggaagacaaatggagaacgaattagatagagaactgttgtgaattaaagtattaggtttggaatacaactttttgggttgattgctcatatttcttagaacagaaattctcagtgtacaactttaactctgaagaaagctacccatccaatgaagaagtagcaaagtgactgtttgccatttctatcttccttctcaatagatttattgaaacatagcatatacatcacctctccacatttgttgtacttttgttatttctagttcattcttgaggtttctctttaacacagcgactattaattctagcccagttggccaggagctgtggctcacacctgtaatcccagcacttgaggttgaggtgggtggaatgcttgagctcaggagttcaagacctttgggcaacatggtgaaaccccatctctactaaaaacacaaatttagctgggtgtggtgatgggcacctgcagtcccatcaccatactcgggaggctgaggcaggagaatcacttgaacttgggaagcagaggttgcagcgagccgagattgtgccactgcactccagcctgggtgacagagcgagactccgtctcaaaaaaaaaaaaaaaattctagtgctgctcaagaagcctctagaagatttgttcatggatgtttacattgtgcctttcagggtacacttttttaaatcttattttacagccaaatacataattatctgatttgtcagtggttttattctccattgtgaaatgtaaagtaatgatgcaacctataattgatgtgaataatttattttgcaattactatttatgtcagtatcagcaaatactacattcatttgtatagatgatattaatctacaggttttatggattattagttcatttcatcctcacagcatctcaagaggtcggcactagttttactcccaatcacctagtgaatttgatctaaagccctacaagaaaggaatggatgaaacttgattttgactgagtctatctttgaagtctttacttacatcacgtgttttagaatatctttttttgtatggaaaacacattctaggaccggattaagaaatgttactctagggccaggcgcagtggctcatgcctgtaataccagcattttgggaggttgaggcaggcagatcacgtgaggtcagaagtttgagaccagcctggccaatgtggcaaaataccgtctctactaaaaatacaaaaaaattatccaggcatgctggcgggcacctgtaatcccagctactcaggaagctgaggcaggagaattgcttgaactcaggaggaggaggttgcagtgagccaagattgcaccattgcactccagcctgggcaacagagcgagaatctgtctcaaaaaaaaaaaaaaaaaaaaaaaggtattctaccccggaagtcatgttcccaaattagatgtaaatcctgtgttaaattgatttaatatttaggtctaagatccacctaggaatgattttatgtgtaatgtgaggttatagatcagattttatttttccctgtggatatatttcttgaaatatttatagaaaaattcacatttccccaattaatcttataaattatttgtgtatatatgcttgtgtctgatttgctctctcctttttttttccattggtttatttctctgtgaaaatatcacactattttagtaagacacttcatttaacacagaattttctctctagggccttctcttagccaagtgtgctattatataaagaagaaagagtgaaaacctctatgccttgaacctacaccaatattctcagttgtcccttgaataaagagcagaatttagaactcactattactgatgacacttaggtctttaatgttcttgtgaatcttagacaacccccacaacatcattccctgctttatttgcttagtccattcttggtggattttatgagatgtcaacactcctcattaggattccctccttctgaagcctttgggattttctacccacccagcaaccaccagaggtggcagaaacccctgcagacatccttcttgcgcaagcgcagttgtaccatgaatgcggtcgtcctgctgcagaccacgcccaccaagggcggggccacatccactgcagctgagctcagagccttctgtggggtctgcagtggcaaggccagccgccccctgtcttccctctggagctgtttgaggaatgcagttcttttgcataagaaaggcttttctctccagtcattctgcttgctgatcaagaacacttaacagcttcaggctttcctggtaatattcattcttgcttttgtgtttttgttttaaggtccaaatatctttaatacttgtatgcagttttcttttttataatttcacataaacatcatctaaaaccaacttcgcatgttcgcattctgtattaacaactttcgtttttgtatttaaaaatacattcataatcactttttcaaaatatcttgtcagttattttcatcttttccatgatcattctttaccagtgcaatggaaatattacttttattaggaaaagcagatgtcacgcggtttttagtgttgtcgagaaatttcctatgaaacatctctggttgaaaaggagaggaacaaaattttatgtgaggcacaagatcacatatgctcagaatcgcatgctttaataaaggctgtgattatttgcattatattgtttagcttgttctaattgtaaaaggtagacaaagaattaatttgtgtagacagaacattgcgactcccattctaaatgtagagacagtcactgcactgcgcaaataggaatgtcgtcatgttgtttgcttttctccttaccccaaaactgtagacattggctagagtctttgatttttttcccaacttgcttttgtaattgtcggcatgatgtttgcacagataaccaatgatatagatatatatttttttcttactatttgatgaatgattaatattttgggttttttttatgttttcagtgaatcaaaaatatcattcagaaaatgttgtcatccatatccaggtagcatatagttttataatctgatcttgtaataaggaaattacagtccttattgattttctgttattagttagcattttttaagttttcatgcttgtgagtatttgggaattttttttttactctgtcaataatttaacacctttgtattggtcatctgggtcgatgtctattgtttaggctcaacctttgacactcctctgaggtagtttttatgtgaatttgtaaccacccaagggattcaccttgccagctgtctagacagagccgatttatcaagacaagggaactataatagagaagcaagaattcacccagagccggctgtgcaggagaccatagttttattattactcaaatcaatctccctgtagggggatcaggggtttctaagaataatttggtgggtagggggtcggaaagtggggagtgctgattggtcatgttggagatgaaatcatagggagtggaagctgtcctcttgcgctgagtcagttccccggttggggccataagatcagatgagtcagtttattgatctgggtggtatcagctgatccatcgggagcagggcctgcaatagatctcaagcactgactgagcttaggtttcacaatagtgatgttatccccaggagcagtttgaggcagtttagagtcctgcagtctccagctggatgaatcctaaaccgtaatttttaatcttgtagctgatttgttattcctacaaaggcatgatggaggggggttgttttgggaaagggctgttactgtcttcatttaaaagctaaactataaaccgaattcctcctgaagttcgcggggaatgaacaagggcagcttggaggttagaagcaagatggagtcagttaggtcagatctctttcactgtaataattttctcagttatgattttttgcaaagatggtttcaaattgatggcttagtgtcctgggtagtgaaaatggaattcctcaacctgaattgaacatggatttcctcctgaagaaacaatttagggctccaaaaagtaaaccaggagcctggcacagtggtcacacctgtaatcccagcactttgggaggctaaggcgggtggatcataaggccaggagtttgatactagcctggacaacatggtgaaaccctgtctacttaaaaaaaaaaaatacaaaaattagccgggcatgctgatatgcacctgtaatcccagctactcgggaggctgaggcaggagaattgcttgaacttgggaggctgaggttgcagtgagtcaacatcgagccactgcactccagtctgggtgacagagaaagactctgtggggtatgatgaggcttctcttcaaatagcctgatcaatcgtttattctttaattaatagtaacccccacccccttttcctttttctcttttttctttctgcctttgttgcatgcccggacatgccacagtagcaggcttatcagtaccagctcacattcctttccttatttggaaaggagactagctctctagctcattgcagacaccccttccccttttcccctctctcccttatgtgcccaccttatctaaagaaagttcaattgtctagccaaccaggattagttcagactgtgcgacctgacctccaccaatgggaaaagggtacaggggcaggacttggggcaggaataaagactcttgtgcccctttgttctggtgtgctttcatggcgactggccaaggagaagcacccctctgcgcagaagtaaaattgctttgctaagaatcctttgtttgagtgttcaatctcccttaggattttgagcattattcccaaccattcaatccaaaaaaaaaagtagaccaggattgatttagggcctgtattataaattgtacaaatgccaacaagattgtattccactagaggaacgcattctctagtgaaggaagcattcctgcaggatgagtccctgagactcactagcaaatttcatacaagtaatgaaatcctcagtctaatggaataaaaacaattccaggggcatttgttaaagatgtataagatgtgagaaaccaacagactaacagcattgatactttatggatatttttattccaaattaatagatgtgttacaggaaaagggtcctgatccagaccccaagagagggttgccgatattcagggccagtctgcagagtaaagtgaaagcaagcttactaagaaagtaaagcagaaaaagaatggttactccatagacagagcagccctgtgggctgctggattcccattttcatggttatttattgattatatgctaaaccaagggtggattatccatgcctcccctttttagaccatataaagtaactttctgatgttgccatggcatttgtaaactgtcgtggtgctggagggatgtagcactgaggacgaccagaggtcactctcgtcaccatcatggttttggtggattttagccggcctctttactgcagcctgttttatcagcaagatctttatgacctgtatcttgtgccagtctcctgatgtgacttaaaatgccttaaccatctgggaatgcagcccagtaggtctcatcctcattttacccagccctattcaagatggagttgctctggttcacatgcctctgacagatggacatttgtttgccaagcaatgctgcaatcaggggctctggatttcagtcctccatacagagaatgtcaagg

SEQ ID NO: 1124 - DNA, 5319 bp, synthetic construct
  misc_feature 1..5319: note = Synthetic polynucleotide
  source 1..5319: mol_type = other DNA
ctgacaccttgactgaatccctgtgaaatatttcacctgaaaatccagctaacctgtgcccactgacccacaggaatggagataatatatttacattgttgtaaactgctaaattgactggatgtggtggctcacacctgtaatcccagcatcttgggaaaccaaggtggggggaatcacttgaggccaggagtttgagactagcctgagcaacgtagcaagaccctgtctctacaaaattaaaaaattagccgagtgtggtggtgtgtgcttgtagtcctagctattctggaggttgaatgggaagatttctttagcccaggagttcgtggttacagtgagctatgatcacaccactgcactccagaatggatgacaacgtgagaccttgtgatatggtttggctgtgtctccacccaaatctcaccttgaattataatcccatgtgtcaagggtggggccaggtggagataattgaaacatggggggtggtttcccctatactgttctcttggtcatgaataagtctcattagatctgatgcttttataaatgggagttcccctgcacaagcgctcttgcctgccaccatgtaacatgtgcctttgcttctcctttgctttcctccatgatggtgagggcttcctagccatgtggaactgtgagtccatgaaacctctttctttataaattacccagtctcagatatgtctttattagcaggctgagaatcaactaatacaccctgtattaatgtattaatacatgaataaaaaaagttgctaaatatgtagaactacactctgtgtcttccctttagtgttaggaagatcaaataggcactacaagagcattttcttggtaaatggtatctaaattccctcttatcaatggcaattactcatttggactgctaacaccataggggcaaaaatcctgacatgtatgaatcttgtgggagaagcacttggaaaaaaaacaaaaacaaaaacaaaaaacagagacaaacatttctgagcaaaaatgcaagctttttaaaaaaaatagtttgttttgatcagttcacatcatgtaggtcatttcatccggcctcattggcatataagtagtatatattgagctaggcgtggtggcttacgcctgtaatcgcagcactttgggaggccgaggcaggcggatcacgaggtgaagagatcgagaccatcctggccaacatggtaaaaccccgtctctactaaaaatacaaaaattagctgggcatggtggcgggctcctgtagtcccagctactcgggagagtgaggcaggagaatcacttgaacccgggaggcagaggttgcaatgagcgaagatcgcaccactgcaccccatcctggcgacagagtgagatctgtctaaaaaaaaaaaaagtagtatatattgaaagtataaaggggtgaaccactttgaattgcgtatgacaaaagaagctcagagttcaggtgaaaaatgtgttattacaaactcaactatcaatttaatctgtctttaatgtatgagtcaaaattaagtgttttctgttggggtgatcggacccaacaccaggccgtgggggcgatgaagtcccacggagtcaaaggaatgagaaaagacaagttaagagagaaactgggaccaggggccaatgctagtatggaggctgcgaaggccccaagctctgggaccccatgctatttattggtgatcaaacaaagaaacaggtggcgaggctgtgggggttgaaaggaagtggtgtatcaagcaaatgagctacagctgtgatggtttagcattttctttgaaacatatggctacttgagataatgggagtgctagaagcaaggagccagcaagtctagacacattccaaaggccacaaggggttttagaccctggaccccagacacgttccaagactcttttacattatgtcagacatccaggccctgcctcaaattctctcccaacactcagcttttctcccaacactttctattacaaacatcaacggaaaaatcaatgatctgtttaaaatattgtaaataccatcactatgtttgaagatatgttttaattttttattattcctttaattaaaagaactgtatgccaattaataagctgttgccttttagatcaaaattaatcattcattgcctgctctgtgaaaattgagtcagatacccttaaaaatatattgtgttgcaatagtaagttttttcagtaattgaaggtggttggacattgtaaaaagagattttcctttctgattccactgtggtctctcagccgtttcccatagcatgcatgcctttctccagcactatatttctacagtatgcatgagcaatcctgcagcaacaatggcttttctagcatcaggctcctacaacgcatgacagtcagcagcactagtggtcagccacttcctatatcccctacccttaggtggtttctagtgtagtgcttccaataatatacctacctgtgaacacctttccctggcacctaagtgggaagatttctggaaagttccactggtgccgcacactgtgactattctgtgtagcctctaacaagctctggattgcaatccacttatagtaaataaatgtccacttcaaacattccctcctcaaattcttgtgttttgtctgcctcctgattggaccctcactgaaagaattaatgctggcattgttccaagagatatttccacagagatgaatctgggaggttgtgttggtcattcctttatgtttgggcacattccacagctccttgtcaatgtgcaatgggatactagcaacctatgacatgcagtggtatcacaattaatcaagcaatgacctgtggttgattgtggcaaagtgccaactgaaacacgtgccttgggagcccgagtgactgctgcactgaatgttatggcagtcaagataactgtaaggactgtggggtggaatggattcagttgagggtccttgagtgattacgaacagaaaataacaagcttaggttccttaattctcagttcaagccacggtttgaaaacctgagaacttccatggcgactataaaggaaattcatttgttgtagctgcagggctgatattgttaaatatcaaaaccaagaatgagatcctgaaacttggaatgggtcaggaaacttggaatgggggaatctgtttagactcagttgaaactgaccatctggaaacagaaagtcaggctgagcctttcttaccagtttaagtagcttgtctctattgtttgaagaaaatatctttcccttgcacaaaagctgggttagataccattaaaggggatgcccatttttcttaaagtcccctacaaatcatcactttttgctagtagcatgactagaccccataactaggattgaatagcaacctattcctaagggataggtacacactatgacctgtaggaaacagctacatgcaaaaggaactgtgacatatattggaagaaacctggggaatgttggaagagcattctaaggccgttatactaaggaggacaaaatataacagtagattgggttaattaatctcagtgctattactggggattcaagatttattgtgctgcaggcatgtggctcacacctataatcccagcactttggatgccaaggcaggaggataagatgagtccataaatttaagaccggtttgggcaacataaagagaccttgtatctacaaaaaataaataaataaataatccagtgagagtggtgcacctgtagtcccagctacttgggggctgagatcagaggatcacttgagccctggaggttgagggtgcagtgagctgtgatcatgcaactgcagtccagcctgggcaacagagccagaccctgtctcaaaaaattaacaaaaaaagatttattttgtagttctcctggtagagatctttcatctccttggttagatgtattccttggtattgccgtcttaggtagaggaagagggctcaaacatcttgcttatgtgataactttgccaaagacacaatgtacaatttgttttaaaggccagtgagggatgtaccagtaatcagaatgttttggcaaacagaagactttggtggtagctaactgatcacagggtccctagaatgaaatagatgagaagcatacttagagtattgtttgatctctatatcaagaaaagttccgggtctggtagtcaaatgttcaacagatgcctacctagctttcaaccctaagtcaattcacagttgcagagtgataccacacggaccatgaaaagaacacttgtttgtatgactgagacaaaaaagaatgtcatcgtgttctaccttacctgggaatatgctcaattggtgacaaaattgttgccactctgtgcatgaccacaaaagtaccgcaggtattgattttgaagttacacataaactttagtgagtgggcatatttgcaaatatgtaacctgagaataatgaagattaactatctttaaacaacataaggagtcaacatcagtttctgaagtaaaataatgactaagttaaattttcaagggcaaattcagattccaagtgcacagaacataggaagaaaaggacatgcaaatcagaaaaattcacaagtgtaatgaggcgagaagggacatggcgcaccaattacaaaggaatcagaatgatctgttcatagagttgtaaatggggttgtggaggaagaaatgaggatgaacagataggcaagacaagttcttttccttctatgtaaataagagaaactgagaaattgtaacgtaagacaagatctaatattatttttggacttcagaatggtattgcataaatgcttaattgttcctgatttcgggaggggaaaatggaaatagcatttccgttgcatttttgtgaacaaaatttgagtgatcatgttctttgttgcatgtggtagatggagaggtgaatgaaagattcagctttcttcctgtacttgaggcatctgtgaattgggaattcagacaaacagataagcaactaattctggatataaaatttgtgatttaggctatgcattctactggggaatttcagatgtataggaatgtagttgaaatttaagtggtcagggaatgctatctagaggaagaaaattatgactagagacaagaataaatagtagtaacttaaaaaaatatatatcagggaagaaaaaatggatttttgttccaggaaagaaactaagtatgaacagatgatgaactatttcaggaactgtgtctgcaattcgttccttccag

SEQ ID NO: 1125 - DNA, 801 bp, synthetic construct
  misc_feature 1..801: note = Synthetic polynucleotide
  source 1..801: mol_type = other DNA
gttttgctccatcacccaggcggagtgcagtggtgccatcacagcttactgcagtctccacctctcaggctcaagtgattctcctacctcagcctcccgagtagctgggaccagaggtgtgcaacaccacatttggcttttttattttttattttgtagagacgagtcttgctatgttgcccaggctggtctcgaactcctggattcaagcgatctgcctgcctcagcctcccaaaggattgggattacaggcttgagcccctgtgcccggcccctatgttttccttttttttttttttaaatttgaaacggagtcctgctctgtcgcccaggctggagtgcagtggtgcaatctccctcaccgcgacctctgcctcccgggctcaagggagtctttagtctcagtcccaagcagctgggactgcaggcgcccgccaccatgcctggctaatttttgtattttttagtagagacagagttttaccatgttggtcaggctgatcacgaacctcctgatctcaggtgatccacctgtctcggcctcccaaagtgctgatattacaggcgtgtgaaccaccgtgcctggccgttttcatttctttgtgatctgcttaggagtagaattgtaggtcatatggtaacttcagggttaacatttgtaagcattgccaaactcttccactgtggctgtgctgtttcacatcccaatcagcagtgttagagggttccaatttctccacctcctccacaacccttgtcattgtctttttaattctagccccaagtggcatctcattgtgg

SEQ ID NO: 1126 - DNA, 3197 bp, synthetic construct
  misc_feature 1..3197: note = Synthetic polynucleotide
  source 1..3197: mol_type = other DNA
gtgatcagagtcaacttcccatgttattttatgtgaatatgtatcaatgaactattagaaattgcaatgtttttgtaggtcaaaacaattcaatattgacaattttatatgattcagcctaatacatcattttttccatcagccatattgcatgttattatttatatatacgtttatttagttagcctatctgttctctgtgaggaacattacacagtttctgagattttgttacgatagaagtcagcattgataagcctctgcgcacctgttttaatgtaggatcattgggaactgagcagtagcttacagggcttgggaggggatttaaccatttagtcaacctccactcacatcaccctcccttcttcgataatgggcaattgagaaagggcaaatgtgtgtaaaaactatgcagatgcagtttcaggattattttcttcttttctgcagtgtcttttcccaagctacatcagcgtctaaattttggagttactgatgcttccgttatttctgcagatagaatattatgtcgtaaataatgtttacttgtccattagtattatataaaagtgcctgtttctccccactccagctatcattgattattggtaaaaattttaatgtatccaattctaataggcaaagaaaggctctcctacttagatcttaggtgggggtctaagttcatatttttgttttacaaaaattgaatagccagtgtttttgagttgaatgatctatccattccgtataggagagtttaattatattgtgattttgggggagataattttcacaatttaccccctcaaaatgtagaaagtagaaaaagggtagaaaaatcgcaccaaatttgaacaatgtagcatgcttttagagttagggatattttcttttggaaggatttcaagtctggcgtatttgcattgattgtggttatggcgcatttaacttttccaaaccagcttttttgtaccgcacataggaagacctgagggtgagtgtaaattaggattgtttggccagtggtgtgtgcaaaaatttattgtagaaccaagaattatttctttagtattttacacattttaaaaaacaggtagacatgtccattgatcccaggttgcttatggtttctagaggccccctctcattgcaacagtgctgtggggccctaggggtccagtagccccctccccccaggtcattccggtgagggagggagctgggacccctgcactgcggcaaacaagcacgcctgcgcggccgcagaggcaggctggcgcgcatgctcaggcggggatgtgtgcgaagcctgccgctgctgcagcgagtctggcgcagagtggagcggccgccggagatgcctgacgcatctgtctgaggagcggtcagtgacgcgatggagcgggcaaggtcagctgtgccggtggcttctctcaagagacagcctggggagcggccacttttattcatcagatattccaagtttttaggacttggagtactgaataaacggaatttgggccctaaagtcctttgttctggagaaccagatccggaatgttcagaggcttgctgttgtgccgttctgccccgatggtatcctgtccgctcgcattggggcgcgtcccccatccgcccccaactgtggtgtcgcgacaggtcctattgcgggtgtctgcggtgggaagggcggtggtgactgggagcatgcggggtaaccgcagtgggcaagggacatgggtggaggtgggtacatcagggtgattgcagttccgtgtggcgagggtacgtggggggaccagtgcatagggattttaggcggaggtaggtatattggagtgattgtggcggggcgaaggtacgtgaagtgatcggtatttagggggtgttgagcgcaggtaggtgtataatagtgaccactgcgtggtggagcagggtacgtggggcgactggggggggaattcgtcgcagtgaccgaggcgaggaggctatggcagtggaccagggggatgagtcggtgtgacagtggtgggggttgtgttggtggtcgcggcgcggggagagtccgtaggaagtggctgggaggtagggggaaggcggcgacagtgggtattggcggcggtgggcattggcagcgggtaggcatggcggtggtggactttggcggcggtaggcatggcggcggtgggcatggcatggaggcggtgggcatggcggccgcggggcctgtcgctgtccggagtgactaagggacgctgaatgattgctgtgtagaggagggggcatcagaaggggcagtagcacagtccgcagcctttaattttcctgtgacctgcgatggtcatctggtttgcctactgtggtggtggtgcttttttattaaaactgcgcaatgcctacactgccgcaggggctgcagaaatgcgtggaatccttgcgtaccctttaggaaccctcgctttagaggctatggcataagaagactggaatgatgtgcagaacttgcatttacagatcttttgactgataggccaggtgatgcctgggggttacttttttttcattgtttctctctgttgggaaccaggtcttggaaggctatgtcgaaataacctgggggtctgtgttgcgtcactgccattgtgcagctccttcaagatggccgccgctgcagcggcttagatctgcgcaagcgcttcagcgggggggtggccgcttcctccctgtagagccgccagtggggagggggcaggtggtgtgtgttcagcttctgctgtttcggagtttcagccgtaccctctttagggtgcagtggtaaggagaggaagccggccaaggtgggcggctgccccctccccaaagtgctgcttgggaaaggatgcaggttgcgcagacgcagcagaggtgacagtcgcctccgcttgcagtggggcgagacgtggggcaggggagcgagggcttacgcagcttttgcctggaaggaatggcagccctccccttcacctggctgatacagcagctgttcctttccggttgtggcgcagtagaggggggaggagggagatgggttggcgcaggctccgcctagcaagcttggcagccaccccttacccacggtgcagcagtagaggactggaggggaatgtggctagaggccaggcatttgtaccacctccgcctgtgtgggatgg

SEQ ID NO: 1127 - DNA, 20571 bp, synthetic construct
  misc_feature 1..20571: note = Synthetic polynucleotide
  source 1..20571: mol_type = other DNA
gggatcctaatatggcagatccctttggaaaggcctcttgaagtttcaaggtctgtgtcctactcagtgaattggctctgtgctagggctttttggaggcagggagtggcagcccttcctgtgatgcagaggaaggaagcttggttgagagacccttatgttgttgtctaaggcagggtactaactgatttggatttattcacagaccttgccttatcttgatttcactattctatctgaccagtgtgtcattgccgaaatgttttccacatttatagttactctgtatctttatgtttcccttaccctgttccttttcctaataaacatctttgttttacaaaaaattttgtttataaggtgtcaaggatgccaagataacctcctttgtttatcagcgccctctgtttagctattttttaggaagaatcatttaagcaggttgtgagtactgccctcaattacttggacaatgaagttttaaaaatcttatttagacctgtcactggtcctgtctcctttttttttttttttgtggcccagggccagaaagcttgagtgagaattgttactacttaaggtagcctctctccatttctggatgctagctggctcaaagttttttttttttttttttttttttttttttttttaaatagaccagggtctccctatgttgtccaggctgaactcgaactgctagactcaagctatatcctctccctcctcagtctctctctggccactgtggctggcccaaattctctttttgttaattctcctcagatttgttttggaggcaatgaggtttcttatattcatggggtacagattagcagcctatcattaaccttatttttttgtttttaggagacagggtctggctatgttgcccaggttggagtgcagtgatgcagttatagctccctgtaacctcaaactcctggatcaatctagactcctgcctcagcctcccaagtgcctgttagtacaggcttgaggtactgtgcccagctaactttttatttttttgtagagaggggtctccttatgttgcccagactggtctcgaactcctggactcaagcagtgcccctgcctaggcctcccaaagtgctggcattgcagccatgagccgctatacctggccaactttgtttatttttattcttgagatcttagttaaattttatggaaaatttaggccgtaataaaattgggattccattgctttttgcttttcaatatatttccggattattactttcagtgtaagtgatctgagggcaaacatttaacaccctttctatatgatgattttttcatgatgtcctcagtttcataaaatgttggtttctgtgttggggatgcagttagataaatgcatgtgtgtgtgtatctagaacattcaataaagtagtgttttcaaaatcttatagatgacattttatatgtagattaaaaataagtagatttaagccaggtgcggtggctcatgtctatagtcccagcacttttggaggccaaggcagaaggatcactggagcctgggagttcaagcttgggtattgagaccccgtctctacatttaaaaaaaggtaaattcagaaagttgaaataatagaatattttggtttgatggctatttcctcagttgacctcagacctttcatattgagcaactgccgaatgggttctttttgttttttggtaagacagtgtttgcagttgtacactattagattaatcatggtttagttgatagtttctttaattgtattatattaaggtactacattattagctgtatttgtgtgcccaccataatgtagcactgatcagtactaaattcctttttatggctgaaagacattcgtttggatatatcatattttcttcattcgtaagttgatggacatttgagttgtttccactctttggctattatgaataatgctactaggaacacgtataatacgtttaatacaaagaattagtttcacaaggttttacttagccctcgtatatgccaggttcttgaaattttgtctttttggaagtatgagagtagtggtagctgggaaggctgcaggtataatagaaagaacatgaactgtctgggcatggtggctcatgcctgtaatcccagcactttgggaggccgaggtgggtagatcacctgagggcaggagctcgacatcagcctggccaacatggtgaaaccctgtctctactataaatacaaaaattagctgggtgtggtggtgcatgcctgtaatcccagctactttggaggctgagtttgggtcttgtaatattacttcatctagcagtagagttagtgtcatatgttactttcatgattaacatttttaggaagttggcaaagtctatatataacactttatgtttccaccagcagtttccccacatcctttacaaatattgtggtgtcagatggtggcatttcagtgggggttttttcattttgaggcagggtctggctctgtcacccaggctggtgtgccagtggcatgatctcaggtcactgcaacctctgcctcctaggctcaagcgccctctcaccttagcctcctgagtagctggtaccacaggcatgcaccaccacacccagctaatttttgtatttttttgtatagatgttgcccaagctggtctcctgagctcaagtgatcgctggcctcagccttccatgaaccattgcgccctgcctcattgggattttgatttgcattttttagtgactaatgttcagcatcatttcatatagattagccacttgtatgtgtttggaggactgtctattcaagtgttttacccatcgtagcaatagaatttgcccttttattgttgagttgtgagagttccttacatattctggataccaaacttgaaaaaatacttttttgaggtgtgagtgacatacaaaagctgtagatagttaatgttaaaagttgatatgctaagagataagtacatgcctttgaaatcattcttatcaaaattagtggcataaatgtgtctgtcacctgaaaaagtttctttgcctctccctaccttcttttttttcattgtttggattttctttttgtttgttttggatactagaaacttagctgtatgttaagcaaatattttttcctattctggttatcctttcactttctttagtgttttcggaactttattttttgatgaagtccactttattttttatactgcttgtaattcaggtgttatatttaatagaccattgtgtaatcaaaagtaataaacattatcagtgtataaaattttaccatttagaaatcaaatatgtgtgtatggcttgattagaacatttaaactcttgaaagaataaaacagctgtgcgttattggtaagctattttaccaatctaaaagtctaacatgacttaaaaacatctagggttcagagaattattaatagcttttggcatgtatctttgaattttgcttttgagatattacttgtgttactttagtgaaaggtcctgctgacctttctgatttatcatctttaaaggttcataggtggtttctgcagtccctaatatggctagtctggtgtgggatttcatgttctgttcccttgagcagccattttatgaggggttctgcagacgtaacatggcgggttttttgtttgtttgtttgtttttgctatgtggatagtttttagcttgagcagctcttctattgctttgcaaatcctaaagaaagcaccatttgcatgtttttttaaagtagatattttataatttaaactatgttctattccactatataagtatgtctactgtatcctaaaaatattttttgaaaccattttggaaatcaggtttactgtttttggggggaaggtgagtagggtagtggtggtatgtatgtatctacatctgcataagtgggaattttatatgtacgtgactacaaatagaggtagatatattattttaatttcattttctgattttttttaaaaccagattttctgatgtcatgggcttctaaaaggagaaaaaagtggttatagcatagattatgactgtttgaaggttaaagatcttgtaataattttaccttgttttaattagatttaaaaatccattatattaaatgtagttctaaatataaccttgacaaatagttatttcatagattgatgcagtctaccaaacaaatgcctctcttttctgtttcagggatcgcttacacctgagacgaactacagaacagcacgtaccagaggtggaagtccaagtcaaacgcagaaggactgcctcactgagcaaccaagagtgagtacagactgtgttgggaacaaatgcaagtcagaatctcctttcagattagaacaaaatatcatgcaatgaggggattaaaatgaacataattgaagaagcagacacatctaatacagaagatgtagtaaaaaagcaatgaaattcttaaccatattatcctaaaataattcaccctcttaaagattttagtataattttcttttttcctatacgtgggtaagtgcattttatctttataaaattttgtaattacccttcaacataagcatacttaaatttttctgcattattaaatcactttgtatgcttgcaaaatgtactgtgcgctgaagtgattaatttacatattcattcttgctctgtgatatttaggtgtttgtttttggttagtgcatttattctgttaaaatttaaaatacatttgtgttttttatcctgttttaagtatatatatgtggaatgtatatataggatgtatacacagacacactcagacacatattttaatttagatttctagaagggaaattttaattaaaaataggtgaacattttaaatgacctaatacatatttagtccacattgaaactttggcattttgtcattgccattaaaattttgatggcattaaaatttgatgccattaaaattttgatcagtaggtagcatttttttcttagctacaattgttttttttaattataagtattaaaaattcatgaagatgattctttttgtaaaacagttttgcataaaaagtaagtctcattttaaagcaactaccaacttaactggccttttcctccccagagataatcattaagtaaatagccatcagaccttgtcctatgcattgtgtgtgtagtggggagagaggaagggaggacatgggacacatttgaagtttgtgtgcatacgacaccgtgctgtctgtattttgacaatatgtcttggtgatcttttcatatcagtacacataaatctaccttattttacaaagtgtgcgtggtgtgataacattattattgtaatcgttagcttgctgctggatatttagtttgtttgcattgtttggctattaacaatgaaaagaacagtcactttgaaaacgcagtgtaggccaggcatggtggcccatgcctgtaatcccagcactttgggaggctaagccaggcggatcacaaggtcaggagttcgagaccagcctggccaacatggtgaaaccccgtctctcctaaaaatacaaaaattaaccgagtgtggtggcacgtgcctgtaatcccagctacttgggaggctgaggcaggagaattgtttgagcccaggagacggaggttgcaatgagctaagatggcaccactgcactctagcctgggtgacagagcaagactccatctcaggaaaaaaaaaaaaagaaaatgcagtgtatgaatactaatttattttatttttttcaaattaaaggtttttcctcatagtaaaaactgagtagtagtttgtgtgtcttttgttatttcctcattttatatgtgaaaagttgagctggatgtggtggctcatgcctctaatcccagcatgttgggaggctgaggtggatcacttgagcccaggaggtggagaccagcctgggcaacatagagagacctcctctctacagaaaaataaattagccaggcgtggtgttgtctacctgtagtctcagctacctgggaggctgaagtggaagggtcacttgatcccaggaggttgaggctgcagtgagccatgtttgtgccactgtactccagtctaggtgacagaatgagatctagtctcaaaaagaaaaaaaaagttgtaaaacatctgttagcaagttttaaattatggtgagggtaaagattttttttttattttttcctatttattttgccgatttttactatagtgagtatatttaagtacattttcattttttaaaattgctttggaagacgtattttatgtacgttttgtttgtatattggtaaatattttgaaagtattttgtgtaatataatttgtcctttatatataataggttattcgatcattcattttatttgatatgaaatctcttttttcatctcttcattctttttgagacggagttttgctcttgttgcccaggatggagtgcaacctccgcctaccaagttcaagtgattctcctgcctcagtctcccaagtaactgggattataggtgtgtgccaccatgcctggctaattttgtatttttttagtagagacagggtttctccatgttggtcaggctgggctcgaactcccgacctcagatgatccgcccgccttggtttctttcccaaagtgctaggattacaggtgtgagccactgcgcccagcctctcccttcattcttttgcagctctgacgtttttttaaagtgccattactattccctgagtttctagaggtagttcagagatggtggtggaggtagggctgaggtttaggactcttaggtttaggactgttaagtgggtgaaggttctatcttgctatatttttgttacagtttttttcctatgtaacctcagtgtggactaaataacaggtagtctcatcctcatcttgttgtgggatgacgttagccttctaggcatcttgtccatatttatggaaacattttgatggttttgaagaagaaataacttgagtttttcttatctgcactgcatatatatgtacaaatactgcagggtcttgagttgggggaatgatctgagtaaagtgtagagttagggaaatagtataatttttcccccttgtgcgttttcattttgagagtaattggattatggaatgggtaagcaggattggttaacactgcctcattgtccatgtgtttaggattctcaggattggtatacttagaatgttatactagaagtgttcaatatttacccattcatctcctacttcctaccaaatcataagtagtattgggaggcagtcttcctggaggagttgtgtggttattagccctaaagatcaatgaaggaggctgggtgcggtggctcacgcctgtaatcccagcactttgggaggcgaaggtgggcagatcacctgaggtcaggagttcaagaccagcctggccaacatggtgaaacctcatctctagaaaaataaaaaaatcagccgggtgtggtagtgtgcacctgtaatcccagctactcaggaggctgaggtggaagaatcgcttgaacctgggaggcaaaggttgcagtgagccgagatggtgccattggctgtgcctgggtgacatagcaagactccatctcaaaataaagtaaaaataaaaagttcactgatttattttaaattttttattctgtctttcagtgtatttgtcactaaattagctcttattctttggggctggatgatgtatcgtgagttcgaagggaaattggaaattggagctggagagttgtcttaatatattttatgctaagcttcacatgtcttttcaaattaatattctgcactctatgaattaaattctgtgtaggctgcctcattttctcagtctttaatcttctattgggttacaggttagatctgagggggacattgcaatagagaattatcttacgtttcaagataacattatatatatttttttttactgaaacactttttagacctttatgaataataatcagaaacttagttgtcatttgtaaacagaggttagagtggagaatgcccaaattaagatttatttattcagtgattagactatgaattagagtataaagtagactatgaattagagtgtgaagatttagaggtatgtgcagtgcaattctgactacttggagttagtgcaaatttcacagttgtctagatgccctccagaacattcccctcaatgcagacaccaactccaagctccagggttggcagggcacccacacttccgaccaacagtctatagattctgaggtcctactattttctcagactttataattgactaaggttttataaatgactagtagatctcaagaaagtgctatacttactagttttttttataaaggatacaaatgaacagatgcatagagcaaaatctgggcaggtcccacacaaatcttccctgtcctcaggatgcattacctgcacattagcgtatatcaccaatcaggaagctcaccagaactccagatgtcgatgatttttgttggggattcattatgttgacaagattgaatcactggacatgtcactgaattcagtcagcaactctcctgccctcccaggagggcttgctcaaaaccccaaccctttagtctttgtttgatcttttgtggcctggttagtcaccatcttgagacatctcattaccaagaactcaggtgtgatcctagggacccaccttgagtaacaaacacatttctttcactgggtaaattccaaggatgtataggatgtataggttacttcccaggaaccaggagcaaaggccagttaaattctttattatacagaagcaattttaaaatgttactgaaaaaccatagaaaaaagtccaatttccaaatccttacatgccaacaagggcagcattgttggtgatcccccagctcctcacctcaaggcaagctgtcatttcctgtatgtcttccttctcatcatcagatttcacagccaggttactgattcataggggtatgtcgagggcttttgtctggaattccctgcttaccagtagatgattggtttacatattttaagagcccttaaatagccctggaagttctatatttcaggtagtgacttgtcaggaggatcaatatgaaggacggcctaaacatctccctgcaaatgctttagcagcatctccctcccctcacccctggggagaaaggattgttcacacaggataatttgaaagtgagtgactatatatggtactgatggtgtttcttcaaggctgccagctcttgtgtttttagttcttttggaaatatttctagacttggtaagtatcttaagtatccactagtcccttgtacaatctctgtgtagagattcctgttttgtgttataatttctcataagatagtgtcatcctctgaccctaaagaaagatcttcttccctgggcgtggtggctcacgcttgtaatcccagcactttgggaggccaaagtgggtggatcacctgaggtcatgagttccagatcagcctggccaacatggtgaaaccccatctctactaaaaatacaaaaaaattagccgagagtggtggcaggcacctgtagtctcagctactcgggaggctgacactggagaatggcgtgaacccaggaggcggagcttgcagtgagcccagatcgtgccactgcactccagcctgggcgacagagtgagactctgtcttaaaaaaaaaaaaaaaaattagctgggtgtggtggtaggtgcctgtaatcccagctacttgggaggctgaggcaggagaatcacttgaaccccgaaggcagtgtttgtggtgagcagaaattgcttcattgcactccagcctgggcaacagaatgagaccctgtctggaaaaaaaaaaaaaaaaaaaaggaatatcttcttaaatgtaagggtacctagttttctttcatatggtttcctataaagacaaatgtatttttatcatttatatatattgtgctcttgttgtaggtgtcagttgtacccgaggcgttctcagcagcagcaagtacctgtggtggatttccaggctgaactgaggcaggcattcttagctgagacaccaagaggtggttaaagccatattggagtagcgaggaatctgattccaagcaaaaaccaggttagagctaatgcagcaatgatcaagaataaagaatcattaaagaatggggtgttgggggttctcttaattatcagtgacacattaatttttttccttagagcttcatacaataaacacattgcagaaagttttagaaagttttgcaggaccttaaattttctgccctgacactttcgtcatgtttctgtattccagttattgtagcgcatgcttttcaggtagttttcttttgcgttttttttaattatataaaaatatttcactataaatggctcttgaataccctgttactgaatgtttataatttccttttgtgggaggtgtcatttttttctgccagtagtttgaacaaagctttagtagatagctttgtataaaacttagaataattttttcaaatatgcagatgtgaaaataaattgaatcaaggaatatgaacttaaggtacatttttctaaattatattgcaaagtattaaattagtattcattgctttcgaaaaataaagggccagttacaacatactttcacagcattattttaattcaaatatggtttatgtcagtgaattataaatacacagcacataattaacaatgagtattagagaatctaaatactttctcatgcttatttactaattcctttttgttttgtctttttctcacttttctgttttaaccaatgtatttcctctttgaatcagcagacaatgtaataaaaatattattcataatttttcaatgtgatgtagatttatttagttctttttatgttgctttcattttttaggaaaaagttattacaaagtcgattttgatttgttttcttgtttttcctctgtgatttttctttttttctactttaagttttagaatgccctcatttctgagagtttactatttactttttacaaagtaagagcagagaggaattgggtttactgataaattccttctagcctttttttaagtctgtttttgaagtattatccttcaacttgaatcagttaggcttgtttatggccaccattttgagttattaattaatttatttatttagagatgaagtttcactctgttgcccaggctggagtgcagtggtatggtttcggctcactgcaacctctgcctcccaggttcaactgattttcctgcctcagcctcccaagtatctgggattataggcacccaccaccacacctggctaatttttgtatttttggtagagacggggtttcaccatgttctccaggctggtctcaaactcctgaactcaggtgatccacctgccttggcctctcaaagtgctgggattacaggcgtgacctaccgcgcccggcccattttgagtttaaatcaaaggagacagaaattttctgagaaatcctcctttcttgaatcctttatacacaacattttctagcaattgcataagcaaattggaatctaatcattgtccaaagcttttcccttgagtaagggaatttttcattgaataggtgtgcacaactgattttttactttttaggaattttttagcttctcagttcagttcacagatttttgtaaatttttaaatacaacatttaagtcatacattatagtctgcaagtaggaccatctaattttatgatacttaattatatcttattctagtctcaactgctagttctacctaaatagtacccattactagtattcctgtagaagaagggttggtaatatatctggaccactacctgtgtctataaatgaaattttattggaacacaactcagttcatttattatgttatctttggccacattggtgctacggtggtgcagctttgagtagttgtgacagattgaatgacaggcaaagcctaaaatacttagtatcttgctatttaaaagaaaataattggctgagttttattttagaggagcagattgaaagaagaaaacaccaaagtgggggccagtcaatatagtcataatgtcatagaaggtgataaagaatagattatagaagtatatacgaagtatacattacagcgtagacaatcagatgaatttcttggggaagggatcagtctaagagtcatgttaaagtctgctgtggaggaagatgggtagtctttaacaacatttaaacacttcgtacccgttttcattaaaaatgtaaggcacacgatggccaggaaaaataagaaaataaactattaatgtggccgggtgtggtggctcacgcctgtcatcctagcacttggggaggctgaggcaggtggatcacctgaggtcagaagttcgagaccaacctggccacatggcgaaaccccatctgttctaaaaatacaaatattagccgggtgtagtgggggacacctgtaatcccagctactcgggaggctgaggcaggagaatttcttgaaccctaggggcagaggttgcattgagcagagattgtgccactgcgcttcagcctgcgtgacagagcaagacttctatctcaaaaaaaaattgtgttatgaatattctgtttttctttggtacctaaatatttaccagggtacatatccaactggatacctacctagtagttgggatgcagggtgtaatattagtatgacttttaaacgtttttgttacattgttttctaaacacatcatgagaagtgctgatggccactaaaaattagtagaccattagtttctcagtaccaccctttgtattctggtgtttttttgtttttgttaaataaacctttccaataaaggaaatttgttttcttgtgtttttaattggaattattgtgtattaatattttgcatttagttttcttttgtcacttgtttttgcatactcttcgatggaggatctctatggagaccctctataattttaaattttaacagatcaatactgatattccatggtgtgtctcatttgctatgtgtgccttggccaaccctagtcatcttattttactatttgctatgtgtgctttggccaaccctagtcatcttattttacttttgaattaaagtagatttacatttttatgtagtttaatcatttgaaagtctacagtttcctaaagtttgaaaacttgtgcttctgtgagggataccagttcgttaatttgcttatgtgccctttgatctcagaagatacactatgactgctcatccatccttgcagtgtgatgttgctactctcgtcgcctttctcatgaagttttgttttcttgtgctgtaaagataaatttgaccactctgcagtgatttattttcttctttcacttacaaggtcatgactacattgtatcacatttagggatgagagagaactgtttctaaattccaaatctgtctcttaagggaatccttttaactgctgtaggaggtcaactcctattgtgagtaaaacatatatctcttctagctatacaggttattattatattatgatatatatataaatataaaataataatctgtccctaattctctaggtcttcagttctttgggccataactcacatccctagatgtgtttcatacctctggaccgctaagcttgtgggagttatttatatcctattgctcaaggtcattgccaaggtctgatttttcacaaaaaaattccaacctctggcataaatgggttaaaaacggctttagtgatgtagtgctgataaacataaaattcacccaatttaagtgcatgaagcaatgatttaagtaaatttacagaactgtgcaatcattgccatgaactactctggaaacattttcatcaccacagtaagatctgtcttgctcattcacagtcatgatccttgttgtctctttggatggctgaaggtcccaagtgttgcagtgctataaaaatggatattgctggctgggcgcagtggctcatgcctgtaatcctagcacttggggaggctgaggccggcaggtcacctgaagtcaggagttcgagactagcctggccaacgtagcgaaattccttctctgctaaaaatacaaaaattagccgggtgtggtggcgggcgcctgtaatcctagctactcaggaggctgaggcaggagaaccacttgaacccgggaagtggaggctgcagtgagccgagatcactccattgcactccagcctgggcaacagagtgagactctgtctcaaaaaaaaaaaaaaaaggatattgctaatgagtctcatataccatgttttcttggatttagactgctttataaagaatcataagataatattcaaaacttctaagttatagtccttaaactcttactcatatttaggacagaaactacatttaatttttgtggaggtctttgtttgcttatttgaaaagttcttttgagatctttataggttttatttaatacattttttaatgtacagacatcagattcatggccactgaatgacagccaggcattagagtattctttttttttttttttttttgagatggagtttcactcttgctgcccaggctggagtgcaatggtgcgatctccgctcaaaaagatacttttgaatccttttcaaaagtaatttgtgtttcattttttaattagtatgataagcacttcaagaccctttacaattctggctagatttggttgccatatttaatagcattttataaataatggagaaaagggaaacattatgcatgcttgattacggtcatgagctgcattaacaattccgttcaacaacagactgcatatgtcagagcagtcccttaagattacaaaaccatgttttcattgtgccttctctctcttccccaccacccccaaccctgagatggagtcttgctctgttgcccaggctggagtacagtggtgccatctcagctcactgcaaactctgcctcctggtttcaagcgattctcctgcctcagcctcctgagtagctgggattacaggcgcctgccaccacacccagctaatgtttgtatttttagtagagatagggttttcgccatgttggccaggctggtcttgaattcttgacctcaggtgatccgcccacctcggtttcccaaagtgttgggattatgggcgtgagccaccacacccagcctcttctctgtttaacattgtattgtgagtgttcatagtatgcaggatagtaacatgatatacaggtttgtagcctaggatctaccatattgcctaagagtatagtagactctgtgtatcctctaggtttgtgtaagtacactgttcatactgtgatgaaatcaccaaatgcatttctcctaatgtgtccccattacgtgacttatttatttattttgagatgaagttttgctcttgtccctccttgttgcccaggctggagtgcagtggcgcgatctcagctcactgcaacctctgcctcccaggttcaagcgattctcctacctcagcctctcaagtagctgggattacaggcacccaccaccatgcctggctaatttttttgtatttctagcagagacgggatttcaccatgttggccaggctggtctcgaactcttgacctcaggtgatccacctgccttggcctcccctggtgctgggattacaggcgtgagccacctcacccggccgttaacgtgatttataactttgtccttcattacttgatctatgaaagttgtttatgtgagtctatatatatatattccatagtcatgtgttctcttttgacatgggaagtcttaggcaggtttataacacacttggctcttagtggggaaagattacctgccatcatcttgaagcgaatttaggggaagaaagaatattgcaaatgacaacataggtatttcagaaaaaaggaaaaatctgaatgaaagagtaattgagatgttgatacagagatgacttcatattaattctgaactagagagagagacactaccttaaataaggatggaaagaaaaatactaaatttgggaaaatgacgcttagtttttgaaacatttaggaattactaggtaaaataaaattcaatgactttcatcagtcctaagtgtgtcaaatgtgagagttaagaatgagggactagggaaatgtggcagtcccttggtgaggaagctagtatgagaggaaggatgtttttgaacgtgtctgtcatagtgattttcatgcaaaattgtctgcctgttttaaaacatggtagattgcagtgcagctttaacatgctttcctctgcaggctccatctactctttgaagcttctgcccagcttgcattgtttctaggagaacctgcgtcatacctttatctatagccttcccctaggtcttcagaagcatcaagttttaactgtggacattggatttggtggaacagcaatcatggtaagctgtatgataaggctgagggttgaaatgtgctgtaagggccgaaagaaatagtttgccagcatgtgcagtgatcttgggttctgaatgttagaaataaggatacatccatggatatggattctcattgcattgagtatcagctgaagatgagctgatttttttatttttatttttttcagacggggtcttgctctgtctcccagtctggagtgcagtggtgcggtcttggctcactgcaaccctgggttcaagagattctcgtgcctcagcctctttattagaaacagggtttcactgtgttggccaggctggtctcaggctcctgacctctggtgatccacccacctcggcctcccaaagtgctgggattacaggcatgagatgagccactgtgcctggccatgagaaatgtttcatgatgtgagaaaatacaggagtttttggtcatgattccaccagtggtgaaggactgtcctgcagatgatggactctcaggtcagattacaatagaaataaagagggctttgaaaatggaagggttttggcattaacagtacagagaaaagcagtctggagagagagaacaccctacatcattgtggtttggtttacttaggggagtggacagtttagagcatgcatcgtcacagagaaggataatcacctgtaaggaggtgaaaattggttcttgagatgtgaaaaaatacttcataatcctttgtggtcctccaaagagccatactaaatatggaagaatgttggtgaaaaaggagagaatatttgtttagttaaggaaaccaggcttagattatgtaagggtggagaagaaacaggagaagattagaagactagggtgttggcaagctgaacatgactcttgtcttactgcttctagactgttggcaagagtagcaagatgctgcagcacattgactatagaatgagatgtatcctgcaagatggccgaatcttcattggcacctttaaggcttttgacaagcatatgaatttgatcctctgtgattgtgatgagttcagaaagatcaagtaaggctgatttgggcaaatgggggttggacacagaggcagtgggaagggaaggccagagctggagtaagggatttccgagggtaactgaagtagttagggaaactatggtagagccagtctattgtttaacctcttgacctgatctctgaattaggtcagagtctgcatctgaactcttttaagtttgtaaaacaatcatggatttattactgggagtaaaagtatatgctatggtcagaatactcgtatttatttttaaaattgagaaaaatgctatattaattaattggttggcttctgcagcagtcttagaccaaatcttggttgaaatggagaagaacagttgttcttcatggttgaggagttgggatatggttgccatttggtatcctctctttgcctatcactgttcccattatttcagttctgtgtcacctgtcattatgatttaattatttaagtaattttttaaagaaatttccattttaatgtggaaacccaggtttcaattttgtttttcttaaaaggtatttcacaaaagaaattagtcttgttgtagtgtaacatcaaaggaacattctgtaaaagactaaagttagattagaaaatagcttcactatttacccttgtatattaactgtgtttacagatattttttggcttgtttttcagtgataactcagtaaatgtttagcatcagttgtcttaattgatacttgaggttgtataaatattttgatgagtgagtgatcactaaaatttatctcactaaaatttaattctgatttgtaggccaaagaatgcgaagcaaccagagcgtgaagaaaagcgggttttgggtctggtgttgctgcgtggggagaacttggtatccatgactgtggaggggccaccccccaaagatgtaaggaagatgtagggcaggacagaactttaatttgcagggacatcatattatgtgagatgtctgaaatcagggtagagcagacacagttcaacatggattgtcaaataaaatgtgccaggcacttaatatcaattgttggttgcctatgctattcgggattaggggatttttggtgaattattctatgtgctgggcattacctaggtaagggtaggagttggtgattcatgtttgcttggtatgtttataaaagaggtgttttcacaatttgacaaataatgtgcattttatacacaagatacctccatggtatacttgcttgtttgttcatttggacacagaactaatatgagataggtgtcatgggaaaatggtggagagaagtgatctctgatgaataagaatactgagaacttgtaaattgtttgattttaggctatgaattttcttgtttcagactggcattgctcgggtaccacttgctggagctgctggaggccctggggttggtagggcagctggtagaggagtaccagctggtgtgccaattccccaggcccctgctggattggcaggccctgtccgaggagttgggggaccatcccagcaggtgaggaaccagcagagggttttatattattgggagaatatgactaagccggaggccgaggagatttaaaaacctaagtgtatgtgtcatacaatgtaaacagcatatggtttaggaggaaccaaaacacagatatatgggaggaagggaataaaactagctgcttaaaatggtcattgggtgattaaagttacccaggttactcttggcaagagtaacttgccactagtggtgagtgaacagaatgcatggatataccacagttgaaaagaccaaagggctttttggatgtcagtgtactaagattagtttttaaaatatgggaataggccgggtgcagtggcttacgcctgtaatccagcactttgggaggccgaggtgggcagatcacttgaggtcaggagttcgacaccagcccggcccacgtggtgaaaaccctatctctactaaaaatacaaaaatcagctgtgtgtggtggtgggtgcctgtaatcccagctaccaggcagggagacaggagaatcgcttgaacccaggagtgggaggctgcagtgagctgagattgcgccattacactccagcctgggtgacaagagtgaaactgtctcaaaaaaaaacatgggaataatgagagaagtacattgcaacagttgtttgtaactaattggtcatttttctcatttattttctgtgtttgaataatgtgaaggtttgcatcgctttgactgtttcccgccctgccttctcaggtaatgactccacagggaagaggcactgtagcagctgctgctgttgctgcgactgccagtattgctggagccccaacacagtacccaccaggacggggcactccgcccccacccgtcggcagagcaaccccacctccaggtaagggattggtgaacacgaagacgaacttgaatctctgatgagagatagcttactgatttaagacacagcctgagagcctaagaatttggggaatatgcttccttcttctagatactggtttttaatgaaagacatagaagagtaattgtcatatagaagttatttgactctatcattgttgtctggcccatttctttagggattatttgggctaaattctaacttttctaagccattttatgaggcctttatttctaccatttttcactgtaggcattatggctcctccacctggtatgagaccacccatgggcccaccaattgggcttccccctgctcgagggacgccaataggcatgccgcctccgggaatgagaccccctccaccaggcattagaggtgagtgggagcataggggtttgatggttcagccaggcccctgaatatgtgtatcctctttttctcaatgtttctatttcctttccaggtccacctcccccaggaatgcgtccaccaaga

SEQ ID NO: 1128 - DNA, 740 bp, synthetic construct
  misc_feature 1..740: note = Synthetic polynucleotide
  source 1..740: mol_type = other DNA
tcatgacccgggggtttaagtggttgtgctgcttcacacatggcctcctgcttctcatgttgctatgtcacattatctgaagggaagtggggatgggatgaaaggccttgtaaggccacctatatactgaaggaagttgtagtgaatcacagtccatgctcattacatatcaaggcatttgaaatagaagttactctttttcttgggatgttgacctcagttgatcaggttttacagtgtcctatgatcagaatagaggatgtgatactggaataatcattttctaccattgagtaagtatttatttataaattactaaatgagtggaagatcctgggtactgggaggcaggaggttgcatatttgagttgataagttgtactactgataataaagataactgacacactaaaacatacttggtacactgaaatacaaattacggttatgtccagtggtatcaccaagtgacaaactgggagctaaatagttcagaaatgccctagtctctaggtccagtttgaattggttatggaacaaagaagccatttataaaagggaagagatttttaggttttgcagctaaggtttatagtaggcagcgagggaatgattcatagtgattgtagcagttggtttaccaagcactaaagagattggtgttaactccataatactgatagactgattggaattacattttttctcttgaatttaccaggagtggttgtgaatgtcac

SEQ ID NO: 1129 - DNA, 10379 bp, synthetic construct
  misc_feature 1..10379: note = Synthetic polynucleotide
  source 1..10379: mol_type = other DNA
caaccaaagtactttacctggatctttcaagacagagcttctcagttcagacaaattgactgatgataagacaaacacttttcctctacaaaccgtggggtagtatgtagagagacctgtgatttcttcccatactgctctggaactacttctaattatacttttttctttgtttgtttttgaaggggaagcatttctccttgcattggtttgctggtatggatggcccttagattttggcatgagtgattatgcagcctatttgaagaaaacctgttttcaggacctttttaattaaatatggcctgttacatgagttaaaggtaagttataagagctctagattctgcaagatgcttgcttcttgtagttattttgcttggtgataatacattttcttttgtctggagcttcctggactttttgagaatcctgattgtgatgatataataggagaaaacttgggatatagatagtataattgagtgtggtgaatcttttgttatggaatgctagtctaagcttctgtgtgtttccactagggacacacatcaacatatcagtcttaaaacattcttggtagttaatgcttgatgttacttaaaaatcatcctacattcttgcattaaactacatacacgtggctgggcgcggtggctcatgcctgtaatcccagcactttgggaggccgaggcaggcagatcccgaggtcagaagatcgagaccatcctggctaacacggtgaaacctcgtctctacaaaaaattcaaaaaattagccgggcgtggtggcaggcacctgtagtcccagctactcgggagcctgaggcaggagaatggtgtgaacctggtggagcttgcagtgagccgagatcgcgccactgcactccagcctgggcgacagagtaaaactctgtctcaaaaaaaaagaaaaaaaaaaaaaaaagaaaatacatacatgtctcatctaaaacatggttggtcaacaactttctgatttcctgatacacattttattaaccggctccttaaatatatccatgttgcatatcatgtttgacatgctttcattgtagcttatagaataatttcaaatagaattttgggataaaaattatgctaccttaaaataggttatgaagtatttgaggtattctctttttatatgataggtaaacttggcttggaattaaaaagattttgaaagttgcttagggagctccctgcttttgtgaactcattattccttaattatgatgtcaaatttcagaagtttgttattaacataccggtattttgctttttatagattcttgtaatagaatattacaagtagaaactgatttacatagataattatgtgaaatagtgctgcttgactaggattttcatgatctcatttcaaagattagcaaaaacaccctttacctggtatgtttacctctgatactaccttcactgatttcagcaggtagtcagttataatccatggattgaagttttgatttatttatttatttatttgagacagagtctcactctgttgcgcaagctggagtacagtggtgtgatcttggctcactttagcctctgccttccgggctgaagcgattctcctgcctcagcctcctgagtagctgggattacaggtgtgggccaccacacctggctaatttttgtatttttggtagagacagggtttcaccatgttggccaggttggtctcaaactcctgacctcaggtgatccgcccaactcagcctcccgaagtgctgggattacaggtgtgagccaccgcaccccgccatgggttgaagtttttaaatgcatgttttccggtagttaatacattgcttgattctgtcttataattgcatttcagttctcttcatcttgtccatacacataataatgcttagtatataataaagcaaggtatattttcatgggatttttgtagtgggagaatgacatctgagcctgaaataggatatttgtgttgtaactttttcagtgtcatacgataccattttttgaccacttagttgatgcctctgaaaggaagagagaatcagatcgctaaaatttgatgtgtcgtcagtgtggatcctactcagtagtgtcacaacgaggctgaaaatcatattaagtgcttttaggacagaaacgtaaactgctcaggtaaaataaccttataaagagaaataagcatatattgcagaggccttggctaggttcatgatgacacaggaccttgtctgaacataatgatttcaaaatttgagcttaaaaatgacactctgaaatccagtcagtgtgcctcactagacttttcgatttcaagattttctgcagaaaatgttttgaaaactttgaatacttaaaaatggcaggtgtagtattgcactttgctagttgctcagatacccttttttatttgtatagatattctgagttcctttttttttctacatgttgtacgttgtcgaaagctaaaaggaaacttatccttggatcacggaaggcagaggcatttggtgagatggaaacaaggatgtgtaaaaatgagacgaccacctctcggattaaaaaaaaaaagtgccagagttctagggttctaagtgatgtccaggaaggaggaggaataatatttatggagcatatattatggaacacagtgagtatagtacctgcctttaaatgaatactgttggttttttaggacagttgcttttttttcttttttcttcagctgtgtgcagttgattaacttgtacagagcctatcacacaatagatgtttaagaaatattaagtgaatgaatgaggcagcattgctaatttttgtatagtgagacagtatctcacagtccaggctggagttcagtggcattaacataactcactgcagccttgaacacctgagctcaaacgatcctttcaccttatcctccagagtagctgggactacagtcgcgtgtcaacatgcctggctaattttagttttctaatttttttagagttgggatctcactatgttgcttagactggtcttgaactcctggcctcatgccatcctcttgcctcagctggtattgtaggtgtgagccactgtgccaggtactaattttttttatgttagaaaacaagtttttaggtattttatagttacttccttatgacaatatctcatcagaatctaggcctatctgatatctgactccatacgtttataccgtgtagtcagccattcccagatagaggtcatttgagttacttagtgtttaccagcacttgtttactaccttgcgatgatatttacagtgtatttttgggtatggttttggggttatttggttgttgttaaaatgcctgtaatcccggcactttgggaggttgaggcgggtggatcacctgaggtcaggagttcgagcccagcctggccaacatggcgaaaccctacctctactaaaaatacaaaaattagcctggcgtggtggcaggcacctgtaatcccaactacgcaggaggctaaggcaggagaattgcttgaacccgggaggcggaggttgcagtgagccgagatcgcgccaatggcactccattcagcttgagtgacagaggtgagactcccatctcaaggtaaaaaaaaaaaatagaaatcagcaactgctatttgagtttacaggagtgagaagtcctctcttgcatggtgagatggggaacatttaattcaatagaaatatttgagaccaggtatggtggctcaagcctgtaatcccagcactttgggaggctgagttgggtggatcacctgacatcaggagtttgagactagcctggccaacatagcaataccctgtctcaaagatacaaaaattacccaagcttggtggtgtgtgtctgtaatcccagctactcaggaggctgaggcaggagaatcacttgaacctgggcggcaaaggttgcagtgagccgagaccatgccactgcactccagcctgggtgacagagtgagactccgtctggaaaaaaaaagaaaaaaatgagatataaagttcaaaggatgtatttattaagccaatataaagtaaagaggtggggaatgttgtagaagtatatgttgataaagggatcaggtggttgtacaataagaagggggttgcagacatggagaaacagttcttctagctcttccactttcagtatcatctgtgtgggtcactggaatcctttttcacaatgcctgcttgcccatgagttttaagaactagtacagtgtagaaatgattagtaggaaaaacttggctgggttaatttgctttgctgagccgattcaacttaaaaagcgaggtccatactaagtgcccaagaatcaagaaggaggctcacatttgaacttgatgtttagttaatgtgaatcattttctgttgaactaatgagaatacagtgaccttgagggttaggttgtacatctgaattgttcgggctgtttcctgtcttttggatgttttgtttgtatagatattttcattttatgttacatcatttgttctttggtagcaaaaattgagttgaaatgatacagttcctgaaatctatgatttcatgtttcggagatatgtatcaggaataatagtgtgggttctcatgagaaaatctggattgcattactgtgctactttggtttcttgtcagagaagttagtagtttagacctccttcagaatcctttctttggactttgtgtttcttacgttgtgccagccttgattttatttgtctgtcctctgtctttctataccatttgtttacacttaactctagaattttttgatgcatgttttcagtgtactctagtcctaaaattggtttacatttaattattggggagaatagcaagttgtcgatagtatctgtggtggcattagtgtatttctgtttcagttctttggacagtttgctagtggaaatagtcattgtatttagctctgtgagacccgactggcagattgctgtctctctctctctctctctctctctctgtgtgtgtgtgtgtgtgtgtgtgtgtgtgtgtgtgtgtatgcgcgcccgcgtttgtttccttcatgtagattgctgtgtgtgtctttttcttcataattccccttaattctgtgtgctttgaatgacactgttgttgttactgttgttttatatccattgtcacataaaactcttatcatttattcttccaggccagggactgtccttatgggtagagatacactatctgcaggaatttatttttttacgtatttttactagttgatgggaaagacattgggaaagacctgggctggatttgtgatgagctgtgtttactgagcatgatgaagtaaagctcaacgtgattactctgaagtccagccttactgtcagtctaaggactcaggatacaaatactcaaaacataaattcttagactctaaatttcacatggtttttcctatcagtacaggttaaggataatggcgtgttgtaggtttttccagtgcaatacaaggaagttggttctagatcctttagtacagttaatgttttgtagagtgtgttctatgttcactgcattggtatgtctcatctttggcatgatcttggctcaccgcaacctccgcctcttgcattcaagcacttcttgtctcagcctccagagtagctgggattacaagcatgtgccaacatgcccggctaatttttgtatgcttttgtggagacaggctttgccatgtttgccaggttggtctctaagtgatccacccgcctcagccccacaaagtgctgggattacatgcgtgagccaccgtacccagccacacctttgcttatttctactatgcatttcaagtgatcatttcaagagaataagtacttaggagctcctatgctctttttttttttaaccctgttgcttgcatcacccggttccaaccctatatgaaagtttcatgagcatgtttctgtcactgaggcagcttctccatttggcatataattgagaaattgctagtttgtggctgagacattggtttgagaggagacgtaatttatatatttagcagaatgcttaagttacatttccagagattaatttaattctacttttaattaagttaaccctttgctgtatctttacaagacgtaggtggagatttaattttgactcttagattcagttaaggtgatgaaattggcattatatagtttttgatgctgagccccacggagattaaaagatttgctaaacaccatgcaatttttgaatcacatctctaatctcacattattctgtactctattttttgcttgtatgattgatgggtctttcattatctgtgattgacattctatgagtaggtgcttttgctttgcctataagtcgttattatgaaggaggaatggtgaataagaaggtaatttagaaaagcctatattaaatataccatgaacattgaatatagcaagatcttattctctagttgttatcttagttgataaattctgtatgtgttatgtgtttgtgtatacatatgtacatattaatgatgtgggtgttgatactgtgatcacatgacaaatgactggtttatagtgaaaagctgttggggttcagagaaatgaacattcttctaaaagtgaggtagataagttattttatagttcttgcctttgagtctctgttcttctggtagaaatgttagtgtatttataacctctcagatttgtttggttctcttagtgttcttgatccaggcagttagcgatatgttggatgaattgagaaaaatgagtttttcctttcctactaactgaattagattagaaataagcagttaagtgagaaaaatagggaattagtgccagatatgttgaggtgtagtgttgacagggggtcttttaccttcagatgtttggtgcaacttagagaatgcagtggtagttgctggcccagcccatccaaacaacctcatttgtggggtgatacttcacagatgacttaaaataaatcccctgaaaataagaatctctggaagagatgacacgtgtatgtgcgtgtgtgcacgtgtgtgcgtgtgtgcacgtgtgtgtgtgtgtgtgttttggtggagtggtaggaggagggttggcttaatgatgagaatcattatttcttgaattggatgacactttccattcctgcaaagggagcgtgaggtccagccttgctaattcatgatcaaagtaatttgctgagagtagtggaaggaatgagttagcagaagatggcaaattgcattaatgagtagtaggaggaaaacaaataagcaaattttaatgtggttggaacatgttcctgagttgtatgaagggagacaggtaaattgagagtaatgttatgattgtttcatttgttggaaataaggaaaacttgcatggtttgaattgtggaacaataggtggtgtatgttaggagtcagaattatcatttaacatgtaagtttctgttttacttcagataaagaatgtcagctacctttcccatgttagcttctataccttttcttgaggtgaccataaataggtaatattgtctttcactgagattgttttaattagcgaagtgtgctgattaaatgtcttttcttgataaattattagaatgaataaaggatggtatttctagatagccttggttagtcagtgatttgtttaaatttagtgtggataagaatcacctgagggctttttaaacacagtttactgggtcctgaccttagtgtttctggcttattaggtataagtatgagaagttgatttttatcaagtttctagatgctacagatctaggaaccatacttagagtgctattatatgtcttttaatgtacactgatatggaaaaagcaatgatacatcatgttatcgcatattttaaaatgtgatcatgaccagggaatcttgaaagttgtcttatgtaataatgtaaatcaatgtagaataccatatatttttttcttgcaaggttattattaataggaatgactatttgtagccaatgtgttcaaatgcatgggaggacgtaaacacttcataatttcctggaaatacagacatatatcacttaaaataatacatttctaatataaatttaaattatctacgtgatatgaggaaacgagcttatttttgataattttcctagcagtgaatcaactatactcatttgaatctaaattaaattaaatttgagtaaattcagccatttctaaattcagtccatataaattcactttgggtaaaagaagacaaaattcctgaaaacagtagattaaaaaaataacattttaagagcaggtatgatctcaatgaatatagtgtggtaatttctgcctaatacctacccttttggaggaaggaaaggtaatcctgtttgtgtttaatgttaattactgaactctttataacttgttttatttatttattgtttgattttaagcatctgcttctggtggacttacatatgttgggtttgggaaatttcaacatacaggttggcattccagtggctatagttgtttcttgaaatttagtactgttttccaatgatgattctctttgggaataggctgttctcttttacttaaaaactgtaaaattagccacttcagttgagactcctccaggtttggaagtggtgaagaatatggatatattcagatcaaatcagtcattctctgtgatacagcaactgaacaagaaacccagacttcaaacaagcagacttctttgggttggactgaataaaatgagaagaaattacagaggatttgaaaatgtatatggcctaggaattattgaaattattttggagggtggcaacaaatttgggacattgtactttctgttttaatgtcaattgtataatgtgtaactctagtgagcatggctggataccgtggcttcacattttaggtagactgggtgttttatctactgagtgaattacagccttcggcaatgatgtcaaggtagcaacaaaacccaaaaaatccatcctttagaaattgttttaagtcacaatgatgataccttctttaaaagctttgacttactgaaataatgcttttcatttgtccaagatgagtacatagcagaatttggaaatatggttccaaaaggctaaatagactgacttttttgatatttttcccttatagggagaaagaaacattaacggtttatcagatgccttgactgtactttttactgctttgtcttcaaggcctagtgtaataattaacatctagtatgtgtttgatggatagccaatttttgcttcattggtatgttgttaccacagtcattggtagagtcaatatatgaatgaagaaagtataacaaatttgccctctagtagagtacaggcaaagtatggccgtcagtttcaccctgattttttttcctccattcttttttagggtttaggtcaagaacaagggcatttcattgtaccacatagctgagagtagggaattgggacatactgtcttgctttaaattaaagttgtctgtttcatcaagtagagaggttcctaagatattgccagatttctgactcggggtttgttaaaaatagaaaaggtagttccttaaggttgtattttattggatgcctccacctgcttcaggctagctcactggagaataaatattccaggttaaaaaaaaaaaagcatgtgttcacgtgaacttgtcctttgagcaaacctgttggaaatcaagaggtcattgctgttggagaggataagagggtgtacttgttggtgtgttaagagtagttcacaacataaaaataaatgtaaatgcatctattatatttgggttggcaaaatatattggttatttactctgttgattcctgtagtgtacataaatatgatctacaactctgtgaacaaaaaggcttgaaaaattgttctgaaaatggacaaatcatgaacagataattgaacaagaaaataagcagaaagtaaatttgtgaaatatttcaaactcatttacattcagaaacatctttttaagatcactgtgatacattcgactgtcaattctgaagagacgtataaaggaaatgccagctaaggagcaaggaaacagctttcattcatgggctaaattgcagcttaaaaaagatggaccaggattatttcctttagaaacttactgtacaaaagatactgttcaccccattagagaactgatttgaagttactcttccctgtgagggctctgtcatcttaactgtattcacatactttcaactgttccccttgctgctaacctcaggttctttagttcatcta

SEQ ID NO: 1130 - DNA, 463 bp, synthetic construct
  misc_feature 1..463: note = Synthetic polynucleotide
  source 1..463: mol_type = other DNA
ctgtagagccatagtccagatctactctatttgtgtgctccttacaacatcagaacagcaactctcaatccggattcatccccagaatgccgtctgagtcacagcgtggcaggtgcataaagaattatctactgaattgagaaacatttcaaatatataaaacttgaaatattttgggtagtctgtacaaactcaagttgacaagccaaccctgcaggaatatatggatagaaggggaaggataacatgttgaattcagctacatgcctcatcagctagaaaaccttggaagaaagaaagatagattgatacttgcctgaacttcatcaaccaataatattttttttcttgctatggagagtccactcgcctttggaagatttaccagtaaaagccctgcacatgatatacttgtgtgcacatgcaataaggacatcattccccaactcctgctagcattgtg

SEQ ID NO: 1131 - DNA, 853 bp, synthetic construct
  misc_feature 1..853: note = Synthetic polynucleotide
  source 1..853: mol_type = other DNA
tgatagagcagcgtggcccaggggaggggctaagcagtggactaaggatggggaggctggagaagaggctgaggggagtcacatgttgtcctgagatgagaaagggaaaaaaagaaacatgttcatcttcaagtgcaaactctcttcagattgaaagaaagtttttagtttcttgggaagcagaaaagaatataggtgaggagtttgagagattcattaatttctttgtgaaattcaacataaaggaagatattctgtgttgctctttgttcactatatgtgtggggctcacagggaagcaatatagacaaagtttccaaattctcagatgttaaaggccaatggggattcagaaaacgcaacagaaactaaactgcaagtggaagagctgcccttgggagcccagagggcaagtttcaggcctggactgggtgggcaagggaggcctccaggaggaggagctttggaggagattgtggagagtgaggagcagtgagtccagcaaacagggcagggaaagcgaggaggaaacagtgtgtctgtggcacaggccagggcatgagaagagggtggtgggttggaaggaccactgggatgagtaatacatgaggaggcaggagaaggaagggcagaccatgcagggactgggcatgggggtgagggtgccgggcagctcagaaagtgatgcaggggccgctctctgaggactgcattctgtggggagggatttgaatgtctcagttcttttatgaaatgttatccccaatccatgaggtcttctgattcaggaaccagtcagaacaggtgagggtggccccagtccactgtgcaggaccattagcattgccaggag

SEQ ID NO: 1132 - DNA, 358 bp, synthetic construct
  misc_feature 1..358: note = Synthetic polynucleotide
  source 1..358: mol_type = other DNA
cattatggttgcctggtttttggaacctggggtactttgtactcctccagcaacagccagaggtggcagagagctgtcagtcatccctgggtgcctcctgcgcaagcgcagttgtcctcctgcgccgacctcgaatgcggtcctcctgctgcagaccacgcccaccaagggctggccgcagccactgtagctgagctcagagccttctgtgtggtttgcgggggcaaggtcagctgccccctgccctctctctggggctatttgaggaatgcggcctttttgcataagaaaggcttttctctacagtaactgtggtcgctgatcaatgacaccttcctggtaacatttcatattgctt

SEQ ID NO: 1133 - DNA, 769 bp, synthetic construct
  misc_feature 1..769: note = Synthetic polynucleotide
  source 1..769: mol_type = other DNA
gttgggctacctttatccttgggattgttgcaagatggccgtgtcatgtaaagggctgtgtcttttagcatcatgaataagatgaaagagttgaaggccaacttcattcaaatgtcttctcgatgtgtccttccctttttctcctggactgctctgtgatccatgtctctgtagaaaatggctggcataagtcaatttctgactgggagctgtcatgattactgtctcccactgttaacactgtacttggaggtcttgatggaattgggcaaacctgttctttcagaccctcagtttcatctcaacacaaaactctccaaaagtccttgctgctccacagcagggaactctcttgaagcaataacatgaggaaatagtgggcttgcatggctgcctcacattcctcaggtatcactgtgctcattgcctgatgtactgtgtcttgccaaccatcattccacgtaatttacccattcttggtttttacattggttaaggcatgtacaaaccctgttagtttttctgcagtatttggattcataccttctgaaattacttgacgattactgtgtctctggttatttgcttctagttggcaatacaaaggaacaatgtgaatgaaactcataaagaaaaacctatgatttaatgggcgtgtgtaacactagagggaaggtcagagttagtctatgcatgggtataggtaggagtctcagtgggtgtcagccattctgtgtcaacaaatcaaatatttaaggtggatctaaaa

SEQ ID NO: 1134 - DNA, 359 bp, synthetic construct
  misc_feature 1..359: note = Synthetic polynucleotide
  source 1..359: mol_type = other DNA
cctcatcccctaccacccttaggccctagtactcaccattctactttgtatttatataaatgagcttttttagattccgcttacacatgggttcatgtggtatttgtctttctcttcccggcatatttcatttaacatattgtcatgcagatacattcattctgcctccaatgacagtaattctccctttttaaggccgataatatcctgttttgcatatacactgcattctttttatccattaatctgttgatgggcacttaggttgatcccatatttggctattgtgactaattctggaatgaatgtgggagtgcagatatctatccaacacaccggatagtcaatgaaatctccca

SEQ ID NO: 1135 - DNA, 109 bp, synthetic construct
  misc_feature 1..109: note = Synthetic polynucleotide
  source 1..109: mol_type = other DNA
acagttcagggcatgagataagggcagtgggttggaaggatcgctgggatgaataatatatgaggaggcaggagcaggaaggacagaccataaagggcctgagcagggg

SEQ ID NO: 1136 - DNA, 1144 bp, synthetic construct
  misc_feature 1..1144: note = Synthetic polynucleotide
  source 1..1144: mol_type = other DNA
ccgcacataggaagacctgagggtgagtgtaaattaggattgtttggccagtggtgtgtgcaaaaatttattgtagaaccaagaattatttctttagtattttacacattttaaaaaacaggtagacatgtccattgatcccaggttgcttatggtttctagaggccccctctcattgcaacagtgctgtggggccctaggggtccagtagccccctccccccaggtcattccggtgagggagggagctgggacccctgcactgcggcaaacaagcacgcctgcgcggccgcagaggcaggctggcgcgcatgctcaggcggggatgtgtgcgaagcctgccgctgctgcagcgagtctggcgcagagtggagcggccgccggagatgcctgacgcatctgtctgaggagcggtcagtgacgcgatggagcgggcaaggtcagctgtgccggtggcttctctcaagagacagcctggggagcggccacttttattcatcagatattccaagtttttaggacttggagtactgaataaacggaatttgggccctaaagtcctttgttctggagaaccagatccggaatgttcagaggcttgctgttgtgccgttctgccccgatggtatcctgtccgctcgcattggggcgcgtcccccatccgcccccaactgtggtgtcgcgacaggtcctattgcgggtgtctgcggtgggaagggcggtggtgactgggagcatgcggggtaaccgcagtgggcaagggacatgggtggaggtgggtacatcagggtgattgcagttccgtgtggcgagggtacgtggggggaccagtgcatagggattttaggcggaggtaggtatattggagtgattgtggcggggcgaaggtacgtgaagtgatcggtatttagggggtgttgagcgcaggtaggtgtataatagtgaccactgcgtggtggagcagggtacgtggggcgactggggggggaattcgtcgcagtgaccgaggcgaggaggctatggcagtggaccagggggatgagtcggtgtgacagtggtgggggttgtgttggtggtcgcggcgcggggagagtccgtaggaagtggctgggaggtagggggaaggcggcgacagtgggtattgg

SEQ ID NO: 1137 - DNA, 169 bp, synthetic construct
  misc_feature 1..169: note = Synthetic polynucleotide
  source 1..169: mol_type = other DNA
gttattgtagcgcatgcttttcaggtagttttcttttgcgttttttttaattatataaaaatatttcactataaatggctcttgaataccctgttactgaatgtttataatttccttttgtgggaggtgtcatttttttctgccagtagtttgaacaaagctttagtag

SEQ ID NO: 1138 - DNA, 2154 bp, synthetic construct
  misc_feature 1..2154: note = Synthetic polynucleotide
  source 1..2154: mol_type = other DNA
ctgcccacctgcagctgtcttgatcgagttatacaaaaagacaaaggcccatattatacacaccttggggcaggaccaagtgttgctgctgtcagggaaatcatggagaataggtatggtcaaaaaggaaacgcaataaggatagaaatagtagtgtacaccggtaaagaagggaaaagctctcatgggtgtccaattgctaagtgggttttaagaagaagcagtgatgaagaaaaagttctttgtttggtccggcagcgtacaggccaccactgtccaactgctgtgatggtggtgctcatcatggtgtgggatggcatccctcttccaatggccgaccggctatacacagagctcacagagaatctaaagtcatacaatgggcaccctaccgacagaagatgcaccctcaatgaaaatcgtacctgtacatgtcaaggaattgatccagagacttgtggagcttcattctcttttggctgttcatggagtatgtactttaatggctgtaagtttggtagaagcccaagccccagaagatttagaattgatccaagctctcccttacatgaaaaaaaccttgaagataacttacagagtttggctacacgattagctccaatttataagcagtatgctccagtagcttaccaaaatcaggtggaatatgaaaatgttgcccgagaatgtcggcttggcagcaaggaaggtcgacccttctctggggtcactgcttgcctggacttctgtgctcatccccacagggacattcacaacatgaataatggaagcactgtggtttgtaccttaactcgagaagataaccgctctttgggtgttattcctcaagatgagcagctccatgtgctacctctttataagctttcagacacagatgagtttggctccaaggaaggaatggaagccaagatcaaatctggggccatcgaggtcctggcaccccgccgcaaaaaaagaacgtgtttcactcagcctgttccccgttctggaaagaagagggctgcgatgatgacagaggttcttgcacataagataagggcagtggaaaagaaacctattccccgaatcaagcggaagaataactcaacaacaacaaacaacagtaagccttcgtcactgccaaccttagggagtaacactgagaccgtgcaacctgaagtaaaaagtgaaaccgaaccccattttatcttaaaaagttcagacaacactaaaacttattcgctgatgccatccgctcctcacccagtgaaagaggcatctccaggcttctcctggtccccgaagactgcttcagccacaccagctccactgaagaatgacgcaacagcctcatgcgggttttcagaaagaagcagcactccccactgtacgatgccttcgggaagactcagtggtgccaatgctgcagctgctgatggccctggcatttcacagcttggcgaagtggctcctctccccaccctgtctgctcctgtgatggagcccctcattaattctgagccttccactggtgtgactgagccgctaacgcctcatcagccaaaccaccagccctccttcctcacctctcctcaagaccttgcctcttctccaatggaagaagatgagcagcattctgaagcagatgagcctccatcagacgaacccctatctgatgaccccctgtcacctgctgaggagaaattgccccacattgatgagtattggtcagacagtgagcacatctttttggatgcaaatattggtggggtggccatcgcacctgctcacggctcggttttgattgagtgtgcccggcgagagctgcacgctaccactcctgttgagcaccccaaccgtaatcatccaacccgcctctcccttgtcttttaccagcacaaaaacctaaataagccccaacatggttttgaactaaacaagattaagtttgaggctaaagaagctaagaataagaaaatgaaggcctcagagcaaaaagaccaggcagctaatgaaggtccagaacagtcctctgaagtaaatgaattgaaccaaattccttctcataaagcattaacattaacccatgacaatgttgtcaccgtgtccccttatgctctcacacacgttgcggggccctataaccattgggtc

SEQ ID NO: 1139 - protein, 718 aa, synthetic construct
  REGION 1..718: note = Synthetic polypeptide
LPTCSCLDRVIQKDKGPYYTHLGAGPSVAAVREIMENRYGQKGNAIRIEIVVYTGKEGKSSHGCPIAKWVLRRSSDEEKVLCLVRQRTGHHCPTAVMVVLIMVWDGIPLPMADRLYTELTENLKSYNGHPTDRRCTLNENRTCTCQGIDPETCGASFSFGCSWSMYFNGCKFGRSPSPRRFRIDPSSPLHEKNLEDNLQSLATRLAPIYKQYAPVAYQNQVEYENVARECRLGSKEGRPFSGVTACLDFCAHPHRDIHNMNNGSTVVCTLTREDNRSLGVIPQDEQLHVLPLYKLSDTDEFGSKEGMEAKIKSGAIEVLAPRRKKRTCFTQPVPRSGKKRAAMMTEVLAHKIRAVEKKPIPRIKRKNNSTTTNNSKPSSLPTLGSNTETVQPEVKSETEPHFILKSSDNTKTYSLMPSAPHPVKEASPGFSWSPKTASATPAPLKNDATASCGFSERSSTPHCTMPSGRLSGANAAAADGPGISQLGEVAPLPTLSAPVMEPLINSEPSTGVTEPLTPHQPNHQPSFLTSPQDLASSPMEEDEQHSEADEPPSDEPLSDDPLSPAEEKLPHIDEYWSDSEHIFLDANIGGVAIAPAHGSVLIECARRELHATTPVEHPNRNHPTRLSLVFYQHKNLNKPQHGFELNKIKFEAKEAKNKKMKASEQKDQAANEGPEQSSEVNELNQIPSHKALTLTHDNVVTVSPYALTHVAGPYNHWV

SEQ ID NO: 1140 - DNA, 86 bp, synthetic construct
  misc_feature 1..86: note = Synthetic polynucleotide
  source 1..86: mol_type = other DNA
gtttaagagctatgctggaaacagcatagcaagtttaaataaggctagtccgttatcaacttgaaaaagtggcaccgagtcggtgc

SEQ ID NO: 1141 - RNA, 86 nt, synthetic construct
  misc_feature 1..86: note = Synthetic polynucleotide
  source 1..86: mol_type = other RNA
gtttaagagctatgctggaaacagcatagcaagtttaaataaggctagtccgttatcaacttgaaaaagtggcaccgagtcggtgc

SEQ ID NO: 1142 - RNA, 106 nt, synthetic construct
  misc_feature 1..106: note = Synthetic polynucleotide
  source 1..106: mol_type = other RNA
ggaaccagtcagaacaggtggtttaagagctatgctggaaacagcatagcaagtttaaataaggctagtccgttatcaacttgaaaaagtggcaccgagtcggtgc

SEQ ID NO: 1143 - DNA, 52 bp, Synthetic construct; identical to SEQ ID NO: 38
  source 1..52: mol_type = other DNA

SEQ ID NO: 1144 - DNA, 51 bp, Synthetic construct; identical to SEQ ID NO: 39
  source 1..51: mol_type = other DNA
  variation 25..30: note = n is a, t, c or g

SEQ ID NO: 1145 - DNA, 43 bp, Synthetic construct; identical to SEQ ID NO: 40
  source 1..43: mol_type = other DNA

SEQ ID NO: 1146 - DNA, 38 bp, Synthetic construct; identical to SEQ ID NO: 41
  source 1..38: mol_type = other DNA

SEQ ID NO: 1147 - DNA, 60 bp, Synthetic construct
  source 1..60: mol_type = other DNA
gttgataacggactagccttatttaaacttgctatgctgtttccagcatagctcttaaac

SEQ ID NO: 1148 - DNA, 20 bp, Synthetic construct
  source 1..20: mol_type = other DNA
gagcggacaggataccatcg

SEQ ID NO: 1149 - DNA, 20 bp, Synthetic construct
  source 1..20: mol_type = other DNA
tgcatagggattttaggcgg

SEQ ID NO: 1150 - DNA, 21 bp, Synthetic construct
  source 1..21: mol_type = other DNA
gccaggtcattccggtgaggg

SEQ ID NO: 1151 - DNA, 21 bp, Synthetic construct
  source 1..21: mol_type = other DNA
gccctcaggtcttcctatgtg

SEQ ID NO: 1152 - DNA, 21 bp, Synthetic construct
  source 1..21: mol_type = other DNA
gccggacagcgacaggccccg

SEQ ID NO: 1153 - DNA, 21 bp, Synthetic construct
  source 1..21: mol_type = other DNA
ggatgcgtcaggcatctccgg

SEQ ID NO: 1154 - DNA, 21 bp, Synthetic construct
  source 1..21: mol_type = other DNA
ggcaggctggcgcgcatgctc

SEQ ID NO: 1155 - DNA, 21 bp, Synthetic construct
  source 1..21: mol_type = other DNA
ggcggcgacagtgggtattgg

SEQ ID NO: 1156 - DNA, 21 bp, Synthetic construct
  source 1..21: mol_type = other DNA
ggtgacgcaacacagaccccc

SEQ ID NO: 1157 - RNA, 20 nt, Synthetic construct
  source 1..20: mol_type = other RNA
gagcggacaggataccatcg

SEQ ID NO: 1158 - RNA, 20 nt, Synthetic construct
  source 1..20: mol_type = other RNA
tgcatagggattttaggcgg

SEQ ID NO: 1159 - RNA, 21 nt, Synthetic construct
  source 1..21: mol_type = other RNA
gccaggtcattccggtgaggg

SEQ ID NO: 1160 - RNA, 21 nt, Synthetic construct
  source 1..21: mol_type = other RNA
gccctcaggtcttcctatgtg

SEQ ID NO: 1161 - RNA, 21 nt, Synthetic construct
  source 1..21: mol_type = other RNA
gccggacagcgacaggccccg

SEQ ID NO: 1162 - RNA, 21 nt, Synthetic construct
  source 1..21: mol_type = other RNA
ggatgcgtcaggcatctccgg

SEQ ID NO: 1163 - RNA, 21 nt, Synthetic construct
  source 1..21: mol_type = other RNA
ggcaggctggcgcgcatgctc

SEQ ID NO: 1164 - RNA, 21 nt, Synthetic construct
  source 1..21: mol_type = other RNA
ggcggcgacagtgggtattgg

SEQ ID NO: 1165 - RNA, 21 nt, Synthetic construct
  source 1..21: mol_type = other RNA
ggtgacgcaacacagaccccc

SEQ ID NO: 1166 - protein, 718 aa, Synthetic construct; identical to SEQ ID NO: 1139

SEQ ID NO: 1167 - DNA, 2154 bp, Synthetic construct; identical to SEQ ID NO: 1138
  source 1..2154: mol_type = other DNA

SEQ ID NO: 1168 - protein, 2173 aa, Synthetic construct
MVPKKKRKVGGGGSGSLPTCSCLDRVIQKDKGPYYTHLGAGPSVAAVREIMENRYGQKGNAIRIEIVVYTGKEGKSSHGCPIAKWVLRRSSDEEKVLCLVRQRTGHHCPTAVMVVLIMVWDGIPLPMADRLYTELTENLKSYNGHPTDRRCTLNENRTCTCQGIDPETCGASFSFGCSWSMYFNGCKFGRSPSPRRFRIDPSSPLHEKNLEDNLQSLATRLAPIYKQYAPVAYQNQVEYENVARECRLGSKEGRPFSGVTACLDFCAHPHRDIHNMNNGSTVVCTLTREDNRSLGVIPQDEQLHVLPLYKLSDTDEFGSKEGMEAKIKSGAIEVLAPRRKKRTCFTQPVPRSGKKRAAMMTEVLAHKIRAVEKKPIPRIKRKNNSTTTNNSKPSSLPTLGSNTETVQPEVKSETEPHFILKSSDNTKTYSLMPSAPHPVKEASPGFSWSPKTASATPAPLKNDATASCGFSERSSTPHCTMPSGRLSGANAAAADGPGISQLGEVAPLPTLSAPVMEPLINSEPSTGVTEPLTPHQPNHQPSFLTSPQDLASSPMEEDEQHSEADEPPSDEPLSDDPLSPAEEKLPHIDEYWSDSEHIFLDANIGGVAIAPAHGSVLIECARRELHATTPVEHPNRNHPTRLSLVFYQHKNLNKPQHGFELNKIKFEAKEAKNKKMKASEQKDQAANEGPEQSSEVNELNQIPSHKALTLTHDNVVTVSPYALTHVAGPYNHWVGRPFGGGGSMDYKDHDGDYKDHDIDYKDDDDKMAPKKKRKVGIHGVPAADKKYSIGLAIGTNSVGWAVITDEYKVPSKKFKVLGNTDRHSIKKNLIGALLFDSGETAEATRLKRTARRRYTRRKNRICYLQEIFSNEMAKVDDSFFHRLEESFLVEEDKKHERHPIFGNIVDEVAYHEKYPTIYHLRKKLVDSTDKADLRLIYLALAHMIKFRGHFLIEGDLNPDNSDVDKLFIQLVQTYNQLFEENPINASGVDAKAILSARLSKSRRLENLIAQLPGEKKNGLFGNLIALSLGLTPNFKSNFDLAEDAKLQLSKDTYDDDLDNLLAQIGDQYADLFLAAKNLSDAILLSDILRVNTEITKAPLSASMIKRYDEHHQDLTLLKALVRQQLPEKYKEIFFDQSKNGYAGYIDGGASQEEFYKFIKPILEKMDGTEELLVKLNREDLLRKQRTFDNGSIPHQIHLGELHAILRRQEDFYPFLKDNREKIEKILTFRIPYYVGPLARGNSRFAWMTRKSEETITPWNFEEVVDKGASAQSFIERMTNFDKNLPNEKVLPKHSLLYEYFTVYNELTKVKYVTEGMRKPAFLSGEQKKAIVDLLFKTNRKVTVKQLKEDYFKKIECFDSVEISGVEDRFNASLGTYHDLLKIIKDKDFLDNEENEDILEDIVLTLTLFEDREMIEERLKTYAHLFDDKVMKQLKRRRYTGWGRLSRKLINGIRDKQSGKTILDFLKSDGFANRNFMQLIHDDSLTFKEDIQKAQVSGQGDSLHEHIANLAGSPAIKKGILQTVKVVDELVKVMGRHKPENIVIEMARENQTTQKGQKNSRERMKRIEEGIKELGSQILKEHPVENTQLQNEKLYLYYLQNGRDMYVDQELDINRLSDYDVDAIVPQSFLKDDSIDNKVLTRSDKNRGKSDNVPSEEVVKKMKNYWRQLLNAKLITQRKFDNLTKAERGGLSELDKAGFIKRQLVETRQITKHVAQILDSRMNTKYDENDKLIREVKVITLKSKLVSDFRKDFQFYKVREINNYHHAHDAYLNAVVGTALIKKYPKLESEFVYGDYKVYDVRKMIAKSEQEIGKATAKYFFYSNIMNFFKTEITLANGEIRKRPLIETNGETGEIVWDKGRDFATVRKVLSMPQVNIVKKTEVQTGGFSKESILPKRNSDKLIARKKDWDPKKYGGFDSPTVAYSVLVVAKVEKGKSKKLKSVKELLGITIMERSSFEKNPIDFLEAKGYKEVKKDLIIKLPKYSLFELENGRKRMLASAGELQKGNELALPSKYVNFLYLASHYEKLKGSPEDNEQKQLFVEQHKHYLDEIIEQISEFSKRVILADANLDKVLSAYNKHRDKPIREQAENIIHLFTLTNLGAPAAFKYFDTTIDRKRYTSTKEVLDATLIHQSITGLYETRIDLSQLGGDKRPAATKKAGQAKKKKGGDFGAS

SEQ ID NO: 1169 - DNA, 6519 bp, Synthetic construct
  source 1..6519: mol_type = other DNA
atggtgccaaaaaagaagagaaaggtaggcggaggcgggagcggatccctgcccacctgcagctgtcttgatcgagttatacaaaaagacaaaggcccatattatacacaccttggggcaggaccaagtgttgctgctgtcagggaaatcatggagaataggtatggtcaaaaaggaaacgcaataaggatagaaatagtagtgtacaccggtaaagaagggaaaagctctcatgggtgtccaattgctaagtgggttttaagaagaagcagtgatgaagaaaaagttctttgtttggtccggcagcgtacaggccaccactgtccaactgctgtgatggtggtgctcatcatggtgtgggatggcatccctcttccaatggccgaccggctatacacagagctcacagagaatctaaagtcatacaatgggcaccctaccgacagaagatgcaccctcaatgaaaatcgtacctgtacatgtcaaggaattgatccagagacttgtggagcttcattctcttttggctgttcatggagtatgtactttaatggctgtaagtttggtagaagcccaagccccagaagatttagaattgatccaagctctcccttacatgaaaaaaaccttgaagataacttacagagtttggctacacgattagctccaatttataagcagtatgctccagtagcttaccaaaatcaggtggaatatgaaaatgttgcccgagaatgtcggcttggcagcaaggaaggtcgacccttctctggggtcactgcttgcctggacttctgtgctcatccccacagggacattcacaacatgaataatggaagcactgtggtttgtaccttaactcgagaagataaccgctctttgggtgttattcctcaagatgagcagctccatgtgctacctctttataagctttcagacacagatgagtttggctccaaggaaggaatggaagccaagatcaaatctggggccatcgaggtcctggcaccccgccgcaaaaaaagaacgtgtttcactcagcctgttccccgttctggaaagaagagggctgcgatgatgacagaggttcttgcacataagataagggcagtggaaaagaaacctattccccgaatcaagcggaagaataactcaacaacaacaaacaacagtaagccttcgtcactgccaaccttagggagtaacactgagaccgtgcaacctgaagtaaaaagtgaaaccgaaccccattttatcttaaaaagttcagacaacactaaaacttattcgctgatgccatccgctcctcacccagtgaaagaggcatctccaggcttctcctggtccccgaagactgcttcagccacaccagctccactgaagaatgacgcaacagcctcatgcgggttttcagaaagaagcagcactccccactgtacgatgccttcgggaagactcagtggtgccaatgctgcagctgctgatggccctggcatttcacagcttggcgaagtggctcctctccccaccctgtctgctcctgtgatggagcccctcattaattctgagccttccactggtgtgactgagccgctaacgcctcatcagccaaaccaccagccctccttcctcacctctcctcaagaccttgcctcttctccaatggaagaagatgagcagcattctgaagcagatgagcctccatcagacgaacccctatctgatgaccccctgtcacctgctgaggagaaattgccccacattgatgagtattggtcagacagtgagcacatctttttggatgcaaatattggtggggtggccatcgcacctgctcacggctcggttttgattgagtgtgcccggcgagagctgcacgctaccactcctgttgagcaccccaaccgtaatcatccaacccgcctctcccttgtcttttaccagcacaaaaacctaaataagccccaacatggttttgaactaaacaagattaagtttgaggctaaagaagctaagaataagaaaatgaaggcctcagagcaaaaagaccaggcagctaatgaaggtccagaacagtcctctgaagtaaatgaattgaaccaaattccttctcataaagcattaacattaacccatgacaatgttgtcaccgtgtccccttatgctctcacacacgttgcggggccctataaccattgggtcggccggccattcggtggaggtggctccatggactataaggaccacgacggagactacaaggatcatgatattgattacaaagacgatgacgataagatggccccaaagaagaagcggaaggtcggtatccacggagtcccagcagccgacaagaagtacagcatcggcctggccatcggcaccaactctgtgggctgggccgtgatcaccgacgagtacaaggtgcccagcaagaaattcaaggtgctgggcaacaccgaccggcacagcatcaagaagaacctgatcggagccctgctgttcgacagcggcgaaacagccgaggccacccggctgaagagaaccgccagaagaagatacaccagacggaagaaccggatctgctatctgcaagagatcttcagcaacgagatggccaaggtggacgacagcttcttccacagactggaagagtccttcctggtggaagaggataagaagcacgagcggcaccccatcttcggcaacatcgtggacgaggtggcctaccacgagaagtaccccaccatctaccacctgagaaagaaactggtggacagcaccgacaaggccgacctgcggctgatctatctggccctggcccacatgatcaagttccggggccacttcctgatcgagggcgacctgaaccccgacaacagcgacgtggacaagctgttcatccagctggtgcagacctacaaccagctgttcgaggaaaaccccatcaacgccagcggcgtggacgccaaggccatcctgtctgccagactgagcaagagcagacggctggaaaatctgatcgcccagctgcccggcgagaagaagaatggcctgttcggaaacctgattgccctgagcctgggcctgacccccaacttcaagagcaacttcgacctggccgaggatgccaaactgcagctgagcaaggacacctacgacgacgacctggacaacctgctggcccagatcggcgaccagtacgccgacctgtttctggccgccaagaacctgtccgacgccatcctgctgagcgacatcctgagagtgaacaccgagatcaccaaggcccccctgagcgcctctatgatcaagagatacgacgagcaccaccaggacctgaccctgctgaaagctctcgtgcggcagcagctgcctgagaagtacaaagagattttcttcgaccagagcaagaacggctacgccggctacattgacggcggagccagccaggaagagttctacaagttcatcaagcccatcctggaaaagatggacggcaccgaggaactgctcgtgaagctgaacagagaggacctgctgcggaagcagcggaccttcgacaacggcagcatcccccaccagatccacctgggagagctgcacgccattctgcggcggcaggaagatttttacccattcctgaaggacaaccgggaaaagatcgagaagatcctgaccttccgcatcccctactacgtgggccctctggccaggggaaacagcagattcgcctggatgaccagaaagagcgaggaaaccatcaccccctggaacttcgaggaagtggtggacaagggcgcttccgcccagagcttcatcgagcggatgaccaacttcgataagaacctgcccaacgagaaggtgctgcccaagcacagcctgctgtacgagtacttcaccgtgtataacgagctgaccaaagtgaaatacgtgaccgagggaatgagaaagcccgccttcctgagcggcgagcagaaaaaggccatcgtggacctgctgttcaagaccaaccggaaagtgaccgtgaagcagctgaaagaggactacttcaagaaaatcgagtgcttcgactccgtggaaatctccggcgtggaagatcggttcaacgcctccctgggcacataccacgatctgctgaaaattatcaaggacaaggacttcctggacaatgaggaaaacgaggacattctggaagatatcgtgctgaccctgacactgtttgaggacagagagatgatcgaggaacggctgaaaacctatgcccacctgttcgacgacaaagtgatgaagcagctgaagcggcggagatacaccggctggggcaggctgagccggaagctgatcaacggcatccgggacaagcagtccggcaagacaatcctggatttcctgaagtccgacggcttcgccaacagaaacttcatgcagctgatccacgacgacagcctgacctttaaagaggacatccagaaagcccaggtgtccggccagggcgatagcctgcacgagcacattgccaatctggccggcagccccgccattaagaagggcatcctgcagacagtgaaggtggtggacgagctcgtgaaagtgatgggccggcacaagcccgagaacatcgtgatcgaaatggccagagagaaccagaccacccagaagggacagaagaacagccgcgagagaatgaagcggatcgaagagggcatcaaagagctgggcagccagatcctgaaagaacaccccgtggaaaacacccagctgcagaacgagaagctgtacctgtactacctgcagaatgggcgggatatgtacgtggaccaggaactggacatcaaccggctgtccgactacgatgtggacgccatcgtgcctcagagctttctgaaggacgactccatcgacaacaaggtgctgaccagaagcgacaagaaccggggcaagagcgacaacgtgccctccgaagaggtcgtgaagaagatgaagaactactggcggcagctgctgaacgccaagctgattacccagagaaagttcgacaatctgaccaaggccgagagaggcggcctgagcgaactggataaggccggcttcatcaagagacagctggtggaaacccggcagatcacaaagcacgtggcacagatcctggactcccggatgaacactaagtacgacgagaatgacaagctgatccgggaagtgaaagtgatcaccctgaagtccaagctggtgtccgatttccggaaggatttccagttttacaaagtgcgcgagatcaacaactaccaccacgcccacgacgcctacctgaacgccgtcgtgggaaccgccctgatcaaaaagtaccctaagctggaaagcgagttcgtgtacggcgactacaaggtgtacgacgtgcggaagatgatcgccaagagcgagcaggaaatcggcaaggctaccgccaagtacttcttctacagcaacatcatgaactttttcaagaccgagattaccctggccaacggcgagatccggaagcggcctctgatcgagacaaacggcgaaaccggggagatcgtgtgggataagggccgggattttgccaccgtgcggaaagtgctgagcatgccccaagtgaatatcgtgaaaaagaccgaggtgcagacaggcggcttcagcaaagagtctatcctgcccaagaggaacagcgataagctgatcgccagaaagaaggactgggaccctaagaagtacggcggcttcgacagccccaccgtggcctattctgtgctggtggtggccaaagtggaaaagggcaagtccaagaaactgaagagtgtgaaagagctgctggggatcaccatcatggaaagaagcagcttcgagaagaatcccatcgactttctggaagccaagggctacaaagaagtgaaaaaggacctgatcatcaagctgcctaagtactccctgttcgagctggaaaacggccggaagagaatgctggcctctgccggcgaactgcagaagggaaacgaactggccctgccctccaaatatgtgaacttcctgtacctggccagccactatgagaagctgaagggctcccccgaggataatgagcagaaacagctgtttgtggaacagcacaagcactacctggacgagatcatcgagcagatcagcgagttctccaagagagtgatcctggccgacgctaatctggacaaagtgctgtccgcctacaacaagcaccgggataagcccatcagagagcaggccgagaatatcatccacctgtttaccctgaccaatctgggagcccctgccgccttcaagtactttgacaccaccatcgaccggaagaggtacaccagcaccaaagaggtgctggacgccaccctgatccaccagagcatcaccggcctgtacgagacacggatcgacctgtctcagctgggaggcgacaaaaggccggcggccacgaaaaaggccggacaggccaaaaagaaaaagggcggagatttcggcgctagc

SEQ ID NO: 1170 - protein, 2200 aa, Synthetic construct
MALPTCSCLDRVIQKDKGPYYTHLGAGPSVAAVREIMENRYGQKGNAIRIEIVVYTGKEGKSSHGCPIAKWVLRRSSDEEKVLCLVRQRTGHHCPTAVMVVLIMVWDGIPLPMADRLYTELTENLKSYNGHPTDRRCTLNENRTCTCQGIDPETCGASFSFGCSWSMYFNGCKFGRSPSPRRFRIDPSSPLHEKNLEDNLQSLATRLAPIYKQYAPVAYQNQVEYENVARECRLGSKEGRPFSGVTACLDFCAHPHRDIHNMNNGSTVVCTLTREDNRSLGVIPQDEQLHVLPLYKLSDTDEFGSKEGMEAKIKSGAIEVLAPRRKKRTCFTQPVPRSGKKRAAMMTEVLAHKIRAVEKKPIPRIKRKNNSTTTNNSKPSSLPTLGSNTETVQPEVKSETEPHFILKSSDNTKTYSLMPSAPHPVKEASPGFSWSPKTASATPAPLKNDATASCGFSERSSTPHCTMPSGRLSGANAAAADGPGISQLGEVAPLPTLSAPVMEPLINSEPSTGVTEPLTPHQPNHQPSFLTSPQDLASSPMEEDEQHSEADEPPSDEPLSDDPLSPAEEKLPHIDEYWSDSEHIFLDANIGGVAIAPAHGSVLIECARRELHATTPVEHPNRNHPTRLSLVFYQHKNLNKPQHGFELNKIKFEAKEAKNKKMKASEQKDQAANEGPEQSSEVNELNQIPSHKALTLTHDNVVTVSPYALTHVAGPYNHWVGGPSSGAPPPSGGSPAGSPTSTEEGTSESATPESGPGTSTEPSEGSAPGSPAGSPTSTEEGTSTEPSEGSAPGTSTEPSEMDKKYSIGLAIGTNSVGWAVITDEYKVPSKKFKVLGNTDRHSIKKNLIGALLFDSGETAEATRLKRTARRRYTRRKNRICYLQEIFSNEMAKVDDSFFHRLEESFLVEEDKKHERHPIFGNIVDEVAYHEKYPTIYHLRKKLVDSTDKADLRLIYLALAHMIKFRGHFLIEGDLNPDNSDVDKLFIQLVQTYNQLFEENPINASGVDAKAILSARLSKSRRLENLIAQLPGEKKNGLFGNLIALSLGLTPNFKSNFDLAEDAKLQLSKDTYDDDLDNLLAQIGDQYADLFLAAKNLSDAILLSDILRVNTEITKAPLSASMIKRYDEHHQDLTLLKALVRQQLPEKYKEIFFDQSKNGYAGYIDGGASQEEFYKFIKPILEKMDGTEELLVKLNREDLLRKQRTFDNGSIPHQIHLGELHAILRRQEDFYPFLKDNREKIEKILTFRIPYYVGPLARGNSRFAWMTRKSEETITPWNFEEVVDKGASAQSFIERMTNFDKNLPNEKVLPKHSLLYEYFTVYNELTKVKYVTEGMRKPAFLSGEQKKAIVDLLFKTNRKVTVKQLKEDYFKKIECFDSVEISGVEDRFNASLGTYHDLLKIIKDKDFLDNEENEDILEDIVLTLTLFEDREMIEERLKTYAHLFDDKVMKQLKRRRYTGWGRLSRKLINGIRDKQSGKTILDFLKSDGFANRNFMQLIHDDSLTFKEDIQKAQVSGQGDSLHEHIANLAGSPAIKKGILQTVKVVDELVKVMGRHKPENIVIEMARENQTTQKGQKNSRERMKRIEEGIKELGSQILKEHPVENTQLQNEKLYLYYLQNGRDMYVDQELDINRLSDYDVDAIVPQSFLKDDSIDNKVLTRSDKNRGKSDNVPSEEVVKKMKNYWRQLLNAKLITQRKFDNLTKAERGGLSELDKAGFIKRQLVETRQITKHVAQILDSRMNTKYDENDKLIREVKVITLKSKLVSDFRKDFQFYKVREINNYHHAHDAYLNAVVGTALIKKYPKLESEFVYGDYKVYDVRKMIAKSEQEIGKATAKYFFYSNIMNFFKTEITLANGEIRKRPLIETNGETGEIVWDKGRDFATVRKVLSMPQVNIVKKTEVQTGGFSKESILPKRNSDKLIARKKDWDPKKYGGFDSPTVAYSVLVVAKVEKGKSKKLKSVKELLGITIMERSSFEKNPIDFLEAKGYKEVKKDLIIKLPKYSLFELENGRKRMLASAGELQKGNELALPSKYVNFLYLASHYEKLKGSPEDNEQKQLFVEQHKHYLDEIIEQISEFSKRVILADANLDKVLSAYNKHRDKPIREQAENIIHLFTLTNLGAPAAFKYFDTTIDRKRYTSTKEVLDATLIHQSITGLYETRIDLSQLGGDGGGGSPKKKRKVDPKKKRKVDPKKKRKVGGSG

SEQ ID NO: 1171 - DNA, 6600 bp, Synthetic construct
  source 1..6600: mol_type = other DNA
atggccctgcccacctgcagctgtcttgatcgagttatacaaaaagacaaaggcccatattatacacaccttggggcaggaccaagtgttgctgctgtcagggaaatcatggagaataggtatggtcaaaaaggaaacgcaataaggatagaaatagtagtgtacaccggtaaagaagggaaaagctctcatgggtgtccaattgctaagtgggttttaagaagaagcagtgatgaagaaaaagttctttgtttggtccggcagcgtacaggccaccactgtccaactgctgtgatggtggtgctcatcatggtgtgggatggcatccctcttccaatggccgaccggctatacacagagctcacagagaatctaaagtcatacaatgggcaccctaccgacagaagatgcaccctcaatgaaaatcgtacctgtacatgtcaaggaattgatccagagacttgtggagcttcattctcttttggctgttcatggagtatgtactttaatggctgtaagtttggtagaagcccaagccccagaagatttagaattgatccaagctctcccttacatgaaaaaaaccttgaagataacttacagagtttggctacacgattagctccaatttataagcagtatgctccagtagcttaccaaaatcaggtggaatatgaaaatgttgcccgagaatgtcggcttggcagcaaggaaggtcgacccttctctggggtcactgcttgcctggacttctgtgctcatccccacagggacattcacaacatgaataatggaagcactgtggtttgtaccttaactcgagaagataaccgctctttgggtgttattcctcaagatgagcagctccatgtgctacctctttataagctttcagacacagatgagtttggctccaaggaaggaatggaagccaagatcaaatctggggccatcgaggtcctggcaccccgccgcaaaaaaagaacgtgtttcactcagcctgttccccgttctggaaagaagagggctgcgatgatgacagaggttcttgcacataagataagggcagtggaaaagaaacctattccccgaatcaagcggaagaataactcaacaacaacaaacaacagtaagccttcgtcactgccaaccttagggagtaacactgagaccgtgcaacctgaagtaaaaagtgaaaccgaaccccattttatcttaaaaagttcagacaacactaaaacttattcgctgatgccatccgctcctcacccagtgaaagaggcatctccaggcttctcctggtccccgaagactgcttcagccacaccagctccactgaagaatgacgcaacagcctcatgcgggttttcagaaagaagcagcactccccactgtacgatgccttcgggaagactcagtggtgccaatgctgcagctgctgatggccctggcatttcacagcttggcgaagtggctcctctccccaccctgtctgctcctgtgatggagcccctcattaattctgagccttccactggtgtgactgagccgctaacgcctcatcagccaaaccaccagccctccttcctcacctctcctcaagaccttgcctcttctccaatggaagaagatgagcagcattctgaagcagatgagcctccatcagacgaacccctatctgatgaccccctgtcacctgctgaggagaaattgccccacattgatgagtattggtcagacagtgagcacatctttttggatgcaaatattggtggggtggccatcgcacctgctcacggctcggttttgattgagtgtgcccggcgagagctgcacgctaccactcctgttgagcaccccaaccgtaatcatccaacccgcctctcccttgtcttttaccagcacaaaaacctaaataagccccaacatggttttgaactaaacaagattaagtttgaggctaaagaagctaagaataagaaaatgaaggcctcagagcaaaaagaccaggcagctaatgaaggtccagaacagtcctctgaagtaaatgaattgaaccaaattccttctcataaagcattaacattaacccatgacaatgttgtcaccgtgtccccttatgctctcacacacgttgcggggccctataaccattgggtcggagggccgagctctggcgcacccccaccaagtggagggtctcctgccgggtccccaacatctactgaagaaggcaccagcgaatccgcaacgcccgagtcaggccctggtacctccacagaaccatctgaaggtagtgcgcctggttccccagctggaagccctacttccaccgaagaaggcacgtcaaccgaaccaagtgaaggatctgcccctgggaccagcactgaaccatctgagatggacaagaagtattctatcggactggccatcgggactaatagcgtcgggtgggccgtgatcactgacgagtacaaggtgccctctaagaagttcaaggtgctcgggaacaccgaccggcattccatcaagaaaaatctgatcggagctctcctctttgattcaggggagaccgctgaagcaacccgcctcaagcggactgctagacggcggtacaccaggaggaagaaccggatttgttaccttcaagagatattctccaacgaaatggcaaaggtcgacgacagcttcttccataggctggaagaatcattcctcgtggaagaggataagaagcatgaacggcatcccatcttcggtaatatcgtcgacgaggtggcctatcacgagaaatacccaaccatctaccatcttcgcaaaaagctggtggactcaaccgacaaggcagacctccggcttatctacctggccctggcccacatgatcaagttcagaggccacttcctgatcgagggcgacctcaatcctgacaatagcgatgtggataaactgttcatccagctggtgcagacttacaaccagctctttgaagagaaccccatcaatgcaagcggagtcgatgccaaggccattctgtcagcccggctgtcaaagagccgcagacttgagaatcttatcgctcagctgccgggtgaaaagaaaaatggactgttcgggaacctgattgctctttcacttgggctgactcccaatttcaagtctaatttcgacctggcagaggatgccaagctgcaactgtccaaggacacctatgatgacgatctcgacaacctcctggcccagatcggtgaccaatacgccgaccttttccttgctgctaagaatctttctgacgccatcctgctgtctgacattctccgcgtgaacactgaaatcaccaaggcccctctttcagcttcaatgattaagcggtatgatgagcaccaccaggacctgaccctgcttaaggcactcgtccggcagcagcttccggagaagtacaaggaaatcttctttgaccagtcaaagaatggatacgccggctacatcgacggaggtgcctcccaagaggaattttataagtttatcaaacctatccttgagaagatggacggcaccgaagagctcctcgtgaaactgaatcgggaggatctgctgcggaagcagcgcactttcgacaatgggagcattccccaccagatccatcttggggagcttcacgccatccttcggcgccaagaggacttctacccctttcttaaggacaacagggagaagattgagaaaattctcactttccgcatcccctactacgtgggacccctcgccagaggaaatagccggtttgcttggatgaccagaaagtcagaagaaactatcactccctggaacttcgaagaggtggtggacaagggagccagcgctcagtcattcatcgaacggatgactaacttcgataagaacctccccaatgagaaggtcctgccgaaacattccctgctctacgagtactttaccgtgtacaacgagctgaccaaggtgaaatatgtcaccgaagggatgaggaagcccgcattcctgtcaggcgaacaaaagaaggcaattgtggaccttctgttcaagaccaatagaaaggtgaccgtgaagcagctgaaggaggactatttcaagaaaattgaatgcttcgactctgtggagattagcggggtcgaagatcggttcaacgcaagcctgggtacctaccatgatctgcttaagatcatcaaggacaaggattttctggacaatgaggagaacgaggacatccttgaggacattgtcctgactctcactctgttcgaggaccgggaaatgatcgaggagaggcttaagacctacgcccatctgttcgacgataaagtgatgaagcaacttaaacggagaagatataccggatggggacgccttagccgcaaactcatcaacggaatccgggacaaacagagcggaaagaccattcttgatttccttaaaagcgacggattcgctaatcgcaacttcatgcaacttatccatgatgattccctgacctttaaggaggacatccagaaggcccaagtgtctggacaaggtgactcactgcacgagcatatcgcaaatctggctggttcacccgctattaagaagggtattctccagaccgtgaaagtcgtggacgagctggtcaaggtgatgggtcgccataaaccagagaacattgtcatcgagatggccagggaaaaccagactacccagaagggacagaagaacagcagggagcggatgaaaagaattgaggaagggattaaggagctcgggtcacagatccttaaagagcacccggtggaaaacacccagcttcagaatgagaagctctatctgtactaccttcaaaatggacgcgatatgtatgtggaccaagagcttgatatcaacaggctctcagactacgacgtggacgccatcgtccctcagagcttcctcaaagacgactcaattgacaataaggtgctgactcgctcagacaagaaccggggaaagtcagataacgtgccctcagaggaagtcgtgaaaaagatgaagaactattggcgccagcttctgaacgcaaagctgatcactcagcggaagttcgacaatctcactaaggctgagaggggcggactgagcgaactggacaaagcaggattcattaaacggcaacttgtggagactcggcagattactaaacatgtcgcccaaatccttgactcacgcatgaataccaagtacgacgaaaacgacaaacttatccgcgaggtgaaggtgattaccctgaagtccaagctggtcagcgatttcagaaaggactttcaattctacaaagtgcgggagatcaataactatcatcatgctcatgacgcatatctgaatgccgtggtgggaaccgccctgatcaagaagtacccaaagctggaaagcgagttcgtgtacggagactacaaggtctacgacgtgcgcaagatgattgccaaatctgagcaggagatcggaaaggccaccgcaaagtacttcttctacagcaacatcatgaatttcttcaagaccgaaatcacccttgcaaacggtgagatccggaagaggccgctcatcgagactaatggggagactggcgaaatcgtgtgggacaagggcagagatttcgctaccgtgcgcaaagtgctttctatgcctcaagtgaacatcgtgaagaaaaccgaggtgcaaaccggaggcttttctaaggaatcaatcctccccaagcgcaactccgacaagctcattgcaaggaagaaggattgggaccctaagaagtacggcggattcgattcaccaactgtggcttattctgtcctggtcgtggctaaggtggaaaaaggaaagtctaagaagctcaagagcgtgaaggaactgctgggtatcaccattatggagcgcagctccttcgagaagaacccaattgactttctcgaagccaaaggttacaaggaagtcaagaaggaccttatcatcaagctcccaaagtatagcctgttcgaactggagaatgggcggaagcggatgctcgcctccgctggcgaacttcagaagggtaatgagctggctctcccctccaagtacgtgaatttcctctaccttgcaagccattacgagaagctgaaggggagccccgaggacaacgagcaaaagcaactgtttgtggagcagcataagcattatctggacgagatcattgagcagatttccgagttttctaaacgcgtcattctcgctgatgccaacctcgataaagtccttagcgcatacaataagcacagagacaaaccaattcgggagcaggctgagaatatcatccacctgttcaccctcaccaatcttggtgcccctgccgcattcaagtacttcgacaccaccatcgaccggaaacgctatacctccaccaaagaagtgctggacgccaccctcatccaccagagcatcaccggactttacgaaactcggattgacctctcacagctcggaggggatggtggcggaggctcgccaaaaaagaagagaaaggtagacccaaagaaaaaacgaaaagtagatccgaaaaagaagaggaaggtgggaggtagtggg

SEQ ID NO: 1172 - protein, 2355 aa, Synthetic construct
MVPKKKRKVGGGGSGSLPTCSCLDRVIQKDKGPYYTHLGAGPSVAAVREIMENRYGQKGNAIRIEIVVYTGKEGKSSHGCPIAKWVLRRSSDEEKVLCLVRQRTGHHCPTAVMVVLIMVWDGIPLPMADRLYTELTENLKSYNGHPTDRRCTLNENRTCTCQGIDPETCGASFSFGCSWSMYFNGCKFGRSPSPRRFRIDPSSPLHEKNLEDNLQSLATRLAPIYKQYAPVAYQNQVEYENVARECRLGSKEGRPFSGVTACLDFCAHPHRDIHNMNNGSTVVCTLTREDNRSLGVIPQDEQLHVLPLYKLSDTDEFGSKEGMEAKIKSGAIEVLAPRRKKRTCFTQPVPRSGKKRAAMMTEVLAHKIRAVEKKPIPRIKRKNNSTTTNNSKPSSLPTLGSNTETVQPEVKSETEPHFILKSSDNTKTYSLMPSAPHPVKEASPGFSWSPKTASATPAPLKNDATASCGFSERSSTPHCTMPSGRLSGANAAAADGPGISQLGEVAPLPTLSAPVMEPLINSEPSTGVTEPLTPHQPNHQPSFLTSPQDLASSPMEEDEQHSEADEPPSDEPLSDDPLSPAEEKLPHIDEYWSDSEHIFLDANIGGVAIAPAHGSVLIECARRELHATTPVEHPNRNHPTRLSLVFYQHKNLNKPQHGFELNKIKFEAKEAKNKKMKASEQKDQAANEGPEQSSEVNELNQIPSHKALTLTHDNVVTVSPYALTHVAGPYNHWVGRPFGGGGSMDYKDHDGDYKDHDIDYKDDDDKMAPKKKRKVGIHGVPAADKKYSIGLAIGTNSVGWAVITDEYKVPSKKFKVLGNTDRHSIKKNLIGALLFDSGETAEATRLKRTARRRYTRRKNRICYLQEIFSNEMAKVDDSFFHRLEESFLVEEDKKHERHPIFGNIVDEVAYHEKYPTIYHLRKKLVDSTDKADLRLIYLALAHMIKFRGHFLIEGDLNPDNSDVDKLFIQLVQTYNQLFEENPINASGVDAKAILSARLSKSRRLENLIAQLPGEKKNGLFGNLIALSLGLTPNFKSNFDLAEDAKLQLSKDTYDDDLDNLLAQIGDQYADLFLAAKNLSDAILLSDILRVNTEITKAPLSASMIKRYDEHHQDLTLLKALVRQQLPEKYKEIFFDQSKNGYAGYIDGGASQEEFYKFIKPILEKMDGTEELLVKLNREDLLRKQRTFDNGSIPHQIHLGELHAILRRQEDFYPFLKDNREKIEKILTFRIPYYVGPLARGNSRFAWMTRKSEETITPWNFEEVVDKGASAQSFIERMTNFDKNLPNEKVLPKHSLLYEYFTVYNELTKVKYVTEGMRKPAFLSGEQKKAIVDLLFKTNRKVTVKQLKEDYFKKIECFDSVEISGVEDRFNASLGTYHDLLKIIKDKDFLDNEENEDILEDIVLTLTLFEDREMIEERLKTYAHLFDDKVMKQLKRRRYTGWGRLSRKLINGIRDKQSGKTILDFLKSDGFANRNFMQLIHDDSLTFKEDIQKAQVSGQGDSLHEHIANLAGSPAIKKGILQTVKVVDELVKVMGRHKPENIVIEMARENQTTQKGQKNSRERMKRIEEGIKELGSQILKEHPVENTQLQNEKLYLYYLQNGRDMYVDQELDINRLSDYDVDAIVPQSFLKDDSIDNKVLTRSDKNRGKSDNVPSEEVVKKMKNYWRQLLNAKLITQRKFDNLTKAERGGLSELDKAGFIKRQLVETRQITKHVAQILDSRMNTKYDENDKLIREVKVITLKSKLVSDFRKDFQFYKVREINNYHHAHDAYLNAVVGTALIKKYPKLESEFVYGDYKVYDVRKMIAKSEQEIGKATAKYFFYSNIMNFFKTEITLANGEIRKRPLIETNGETGEIVWDKGRDFATVRKVLSMPQVNIVKKTEVQTGGFSKESILPKRNSDKLIARKKDWDPKKYGGFDSPTVAYSVLVVAKVEKGKSKKLKSVKELLGITIMERSSFEKNPIDFLEAKGYKEVKKDLIIKLPKYSLFELENGRKRMLASAGELQKGNELALPSKYVNFLYLASHYEKLKGSPEDNEQKQLFVEQHKHYLDEIIEQISEFSKRVILADANLDKVLSAYNKHRDKPIREQAENIIHLFTLTNLGAPAAFKYFDTTIDRKRYTSTKEVLDATLIHQSITGLYETRIDLSQLGGDKRPAATKKAGQAKKKKGGDFGASEGRGSLLTCGDVEENPGPGTMNPAISVALLLSVLQVSRGQKVTSLTACLVNQNLRLDCRHENNTKDNSIQHEFSLTREKRKHVLSGTLGIPEHTYRSRVTLSNQPYIKVLTLANFTTKDEGDYFCELRVSGANPMSSNKSISVYRDKLVKCGGISLLVQNTSWMLLLLLSLSLLQALDFISL

SEQ ID NO: 1173 - DNA, 7068 bp, Synthetic construct
  source 1..7068: mol_type = other DNA
atggtgccaaaaaagaagagaaaggtaggcggaggcgggagcggatccctgcccacctgcagctgtcttgatcgagttatacaaaaagacaaaggcccatattatacacaccttggggcaggaccaagtgttgctgctgtcagggaaatcatggagaataggtatggtcaaaaaggaaacgcaataaggatagaaatagtagtgtacaccggtaaagaagggaaaagctctcatgggtgtccaattgctaagtgggttttaagaagaagcagtgatgaagaaaaagttctttgtttggtccggcagcgtacaggccaccactgtccaactgctgtgatggtggtgctcatcatggtgtgggatggcatccctcttccaatggccgaccggctatacacagagctcacagagaatctaaagtcatacaatgggcaccctaccgacagaagatgcaccctcaatgaaaatcgtacctgtacatgtcaaggaattgatccagagacttgtggagcttcattctcttttggctgttcatggagtatgtactttaatggctgtaagtttggtagaagcccaagccccagaagatttagaattgatccaagctctcccttacatgaaaaaaaccttgaagataacttacagagtttggctacacgattagctccaatttataagcagtatgctccagtagcttaccaaaatcaggtggaatatgaaaatgttgcccgagaatgtcggcttggcagcaaggaaggtcgacccttctctggggtcactgcttgcctggacttctgtgctcatccccacagggacattcacaacatgaataatggaagcactgtggtttgtaccttaactcgagaagataaccgctctttgggtgttattcctcaagatgagcagctccatgtgctacctctttataagctttcagacacagatgagtttggctccaaggaaggaatggaagccaagatcaaatctggggccatcgaggtcctggcaccccgccgcaaaaaaagaacgtgtttcactcagcctgttccccgttctggaaagaagagggctgcgatgatgacagaggttcttgcacataagataagggcagtggaaaagaaacctattccccgaatcaagcggaagaataactcaacaacaacaaacaacagtaagccttcgtcactgccaaccttagggagtaacactgagaccgtgcaacctgaagtaaaaagtgaaaccgaaccccattttatcttaaaaagttcagacaacactaaaacttattcgctgatgccatccgctcctcacccagtgaaagaggcatctccaggcttctcctggtccccgaagactgcttcagccacaccagctccactgaagaatgacgcaacagcctcatgcgggttttcagaaagaagcagcactccccactgtacgatgccttcgggaagactcagtggtgccaatgctgcagctgctgatggccctggcatttcacagcttggcgaagtggctcctctccccaccctgtctgctcctgtgatggagcccctcattaattctgagccttccactggtgtgactgagccgctaacgcctcatcagccaaaccaccagccctccttcctcacctctcctcaagaccttgcctcttctccaatggaagaagatgagcagcattctgaagcagatgagcctccatcagacgaacccctatctgatgaccccctgtcacctgctgaggagaaattgccccacattgatgagtattggtcagacagtgagcacatctttttggatgcaaatattggtggggtggccatcgcacctgctcacggctcggttttgattgagtgtgcccggcgagagctgcacgctaccactcctgttgagcaccccaaccgtaatcatccaacccgcctctcccttgtcttttaccagcacaaaaacctaaataagccccaacatggttttgaactaaacaagattaagtttgaggctaaagaagctaagaataagaaaatgaaggcctcagagcaaaaagaccaggcagctaatgaaggtccagaacagtcctctgaagtaaatgaattgaaccaaattccttctcataaagcattaacattaacccatgacaatgttgtcaccgtgtccccttatgctctcacacacgttgcggggccctataaccattgggtcggccggccattcggtggaggtggctccatggactataaggaccacgacggagactacaaggatcatgatattgattacaaagacgatgacgataagatggccccaaagaagaagcggaaggtcggtatccacggagtcccagcagccgacaagaagtacagcatcggcctggccatcggcaccaactctgtgggctgggccgtgatcaccgacgagtacaaggtgcccagcaagaaattcaaggtgctgggcaacaccgaccggcacagcatcaagaagaacctgatcggagccctgctgttcgacagcggcgaaacagccgaggccacccggctgaagagaaccgccagaagaagatacaccagacggaagaaccggatctgctatctgcaagagatcttcagcaacgagatggccaaggtggacgacagcttcttccacagactggaagagtccttcctggtggaagaggataagaagcacgagcggcaccccatcttcggcaacatcgtggacgaggtggcctaccacgagaagtaccccaccatctaccacctgagaaagaaactggtggacagcaccgacaaggccgacctgcggctgatctatctggccctggcccacatgatcaagttccggggccacttcctgatcgagggcgacctgaaccccgacaacagcgacgtggacaagctgttcatccagctggtgcagacctacaaccagctgttcgaggaaaaccccatcaacgccagcggcgtggacgccaaggccatcctgtctgccagactgagcaagagcagacggctggaaaatctgatcgcccagctgcccggcgagaagaagaatggcctgttcggaaacctgattgccctgagcctgggcctgacccccaacttcaagagcaacttcgacctggccgaggatgccaaactgcagctgagcaaggacacctacgacgacgacctggacaacctgctggcccagatcggcgaccagtacgccgacctgtttctggccgccaagaacctgtccgacgccatcctgctgagcgacatcctgagagtgaacaccgagatcaccaaggcccccctgagcgcctctatgatcaagagatacgacgagcaccaccaggacctgaccctgctgaaagctctcgtgcggcagcagctgcctgagaagtacaaagagattttcttcgaccagagcaagaacggctacgccggctacattgacggcggagccagccaggaagagttctacaagttcatcaagcccatcctggaaaagatggacggcaccgaggaactgctcgtgaagctgaacagagaggacctgctgcggaagcagcggaccttcgacaacggcagcatcccccaccagatccacctgggagagctgcacgccattctgcggcggcaggaagatttttacccattcctgaaggacaaccgggaaaagatcgagaagatcctgaccttccgcatcccctactacgtgggccctctggccaggggaaacagcagattcgcctggatgaccagaaagagcgaggaaaccatcaccccctggaacttcgaggaagtggtggacaagggcgcttccgcccagagcttcatcgagcggatgaccaacttcgataagaacctgcccaacgagaaggtgctgcccaagcacagcctgctgtacgagtacttcaccgtgtataacgagctgaccaaagtgaaatacgtgaccgagggaatgagaaagcccgccttcctgagcggcgagcagaaaaaggccatcgtggacctgctgttcaagaccaaccggaaagtgaccgtgaagcagctgaaagaggactacttcaagaaaatcgagtgcttcgactccgtggaaatctccggcgtggaagatcggttcaacgcctccctgggcacataccacgatctgctgaaaattatcaaggacaaggacttcctggacaatgaggaaaacgaggacattctggaagatatcgtgctgaccctgacactgtttgaggacagagagatgatcgaggaacggctgaaaacctatgcccacctgttcgacgacaaagtgatgaagcagctgaagcggcggagatacaccggctggggcaggctgagccggaagctgatcaacggcatccgggacaagcagtccggcaagacaatcctggatttcctgaagtccgacggcttcgccaacagaaacttcatgcagctgatccacgacgacagcctgacctttaaagaggacatccagaaagcccaggtgtccggccagggcgatagcctgcacgagcacattgccaatctggccggcagccccgccattaagaagggcatcctgcagacagtgaaggtggtggacgagctcgtgaaagtgatgggccggcacaagcccgagaacatcgtgatcgaaatggccagagagaaccagaccacccagaagggacagaagaacagccgcgagagaatgaagcggatcgaagagggcatcaaagagctgggcagccagatcctgaaagaacaccccgtggaaaacacccagctgcagaacgagaagctgtacctgtactacctgcagaatgggcgggatatgtacgtggaccaggaactggacatcaaccggctgtccgactacgatgtggacgccatcgtgcctcagagctttctgaaggacgactccatcgacaacaaggtgctgaccagaagcgacaagaaccggggcaagagcgacaacgtgccctccgaagaggtcgtgaagaagatgaagaactactggcggcagctgctgaacgccaagctgattacccagagaaagttcgacaatctgaccaaggccgagagaggcggcctgagcgaactggataaggccggcttcatcaagagacagctggtggaaacccggcagatcacaaagcacgtggcacagatcctggactcccggatgaacactaagtacgacgagaatgacaagctgatccgggaagtgaaagtgatcaccctgaagtccaagctggtgtccgatttccggaaggatttccagttttacaaagtgcgcgagatcaacaactaccaccacgcccacgacgcctacctgaacgccgtcgtgggaaccgccctgatcaaaaagtaccctaagctggaaagcgagttcgtgtacggcgactacaaggtgtacgacgtgcggaagatgatcgccaagagcgagcaggaaatcggcaaggctaccgccaagtacttcttctacagcaacatcatgaactttttcaagaccgagattaccctggccaacggcgagatccggaagcggcctctgatcgagacaaacggcgaaaccggggagatcgtgtgggataagggccgggattttgccaccgtgcggaaagtgctgagcatgccccaagtgaatatcgtgaaaaagaccgaggtgcagacaggcggcttcagcaaagagtctatcctgcccaagaggaacagcgataagctgatcgccagaaagaaggactgggaccctaagaagtacggcggcttcgacagccccaccgtggcctattctgtgctggtggtggccaaagtggaaaagggcaagtccaagaaactgaagagtgtgaaagagctgctggggatcaccatcatggaaagaagcagcttcgagaagaatcccatcgactttctggaagccaagggctacaaagaagtgaaaaaggacctgatcatcaagctgcctaagtactccctgttcgagctggaaaacggccggaagagaatgctggcctctgccggcgaactgcagaagggaaacgaactggccctgccctccaaatatgtgaacttcctgtacctggccagccactatgagaagctgaagggctcccccgaggataatgagcagaaacagctgtttgtggaacagcacaagcactacctggacgagatcatcgagcagatcagcgagttctccaagagagtgatcctggccgacgctaatctggacaaagtgctgtccgcctacaacaagcaccgggataagcccatcagagagcaggccgagaatatcatccacctgtttaccctgaccaatctgggagcccctgccgccttcaagtactttgacaccaccatcgaccggaagaggtacaccagcaccaaagaggtgctggacgccaccctgatccaccagagcatcaccggcctgtacgagacacggatcgacctgtctcagctgggaggcgacaaaaggccggcggccacgaaaaaggccggacaggccaaaaagaaaaagggcggagatttcggcgctagcgagggcagaggaagtcttctaacatgcggtgacgtggaggagaatcccggccctggtaccatgaacccagccatcagcgtcgctctcctgctctcagtcttgcaggtgtcccgagggcagaaggtgaccagcctgacagcctgcctggtgaaccaaaaccttcgcctggactgccgccatgagaataacaccaaggataactccatccagcatgagttcagcctgacccgagagaagaggaagcacgtgctctcaggcacccttgggatacccgagcacacgtaccgctcccgcgtcaccctctccaaccagccctatatcaaggtccttaccctagccaacttcaccaccaaggatgagggcgactacttttgtgagcttcgcgtttcgggcgcgaatcccatgagctccaataaaagtatcagtgtgtatagagacaagctggtcaagtgtggcggcataagcctgctggttcagaacacatcctggatgctgctgctgctgctttccctctccctcctccaagccctggacttcatttctctgtga

SEQ ID NO: 1174 - protein, 2381 aa, Synthetic construct
MALPTCSCLDRVIQKDKGPYYTHLGAGPSVAAVREIMENRYGQKGNAIRIEIVVYTGKEGKSSHGCPIAKWVLRRSSDEEKVLCLVRQRTGHHCPTAVMVVLIMVWDGIPLPMADRLYTELTENLKSYNGHPTDRRCTLNENRTCTCQGIDPETCGASFSFGCSWSMYFNGCKFGRSPSPRRFRIDPSSPLHEKNLEDNLQSLATRLAPIYKQYAPVAYQNQVEYENVARECRLGSKEGRPFSGVTACLDFCAHPHRDIHNMNNGSTVVCTLTREDNRSLGVIPQDEQLHVLPLYKLSDTDEFGSKEGMEAKIKSGAIEVLAPRRKKRTCFTQPVPRSGKKRAAMMTEVLAHKIRAVEKKPIPRIKRKNNSTTTNNSKPSSLPTLGSNTETVQPEVKSETEPHFILKSSDNTKTYSLMPSAPHPVKEASPGFSWSPKTASATPAPLKNDATASCGFSERSSTPHCTMPSGRLSGANAAAADGPGISQLGEVAPLPTLSAPVMEPLINSEPSTGVTEPLTPHQPNHQPSFLTSPQDLASSPMEEDEQHSEADEPPSDEPLSDDPLSPAEEKLPHIDEYWSDSEHIFLDANIGGVAIAPAHGSVLIECARRELHATTPVEHPNRNHPTRLSLVFYQHKNLNKPQHGFELNKIKFEAKEAKNKKMKASEQKDQAANEGPEQSSEVNELNQIPSHKALTLTHDNVVTVSPYALTHVAGPYNHWVGGPSSGAPPPSGGSPAGSPTSTEEGTSESATPESGPGTSTEPSEGSAPGSPAGSPTSTEEGTSTEPSEGSAPGTSTEPSEMDKKYSIGLAIGTNSVGWAVITDEYKVPSKKFKVLGNTDRHSIKKNLIGALLFDSGETAEATRLKRTARRRYTRRKNRICYLQEIFSNEMAKVDDSFFHRLEESFLVEEDKKHERHPIFGNIVDEVAYHEKYPTIYHLRKKLVDSTDKADLRLIYLALAHMIKFRGHFLIEGDLNPDNSDVDKLFIQLVQTYNQLFEENPINASGVDAKAILSARLSKSRRLENLIAQLPGEKKNGLFGNLIALSLGLTPNFKSNFDLAEDAKLQLSKDTYDDDLDNLLAQIGDQYADLFLAAKNLSDAILLSDILRVNTEITKAPLSASMIKRYDEHHQDLTLLKALVRQQLPEKYKEIFFDQSKNGYAGYIDGGASQEEFYKFIKPILEKMDGTEELLVKLNREDLLRKQRTFDNGSIPHQIHLGELHAILRRQEDFYPFLKDNREKIEKILTFRIPYYVGPLARGNSRFAWMTRKSEETITPWNFEEVVDKGASAQSFIERMTNFDKNLPNEKVLPKHSLLYEYFTVYNELTKVKYVTEGMRKPAFLSGEQKKAIVDLLFKTNRKVTVKQLKEDYFKKIECFDSVEISGVEDRFNASLGTYHDLLKIIKDKDFLDNEENEDILEDIVLTLTLFEDREMIEERLKTYAHLFDDKVMKQLKRRRYTGWGRLSRKLINGIRDKQSGKTILDFLKSDGFANRNFMQLIHDDSLTFKEDIQKAQVSGQGDSLHEHIANLAGSPAIKKGILQTVKVVDELVKVMGRHKPENIVIEMARENQTTQKGQKNSRERMKRIEEGIKELGSQILKEHPVENTQLQNEKLYLYYLQNGRDMYVDQELDINRLSDYDVDAIVPQSFLKDDSIDNKVLTRSDKNRGKSDNVPSEEVVKKMKNYWRQLLNAKLITQRKFDNLTKAERGGLSELDKAGFIKRQLVETRQITKHVAQILDSRMNTKYDENDKLIREVKVITLKSKLVSDFRKDFQFYKVREINNYHHAHDAYLNAVVGTALIKKYPKLESEFVYGDYKVYDVRKMIAKSEQEIGKATAKYFFYSNIMNFFKTEITLANGEIRKRPLIETNGETGEIVWDKGRDFATVRKVLSMPQVNIVKKTEVQTGGFSKESILPKRNSDKLIARKKDWDPKKYGGFDSPTVAYSVLVVAKVEKGKSKKLKSVKELLGITIMERSSFEKNPIDFLEAKGYKEVKKDLIIKLPKYSLFELENGRKRMLASAGELQKGNELALPSKYVNFLYLASHYEKLKGSPEDNEQKQLFVEQHKHYLDEIIEQISEFSKRVILADANLDKVLSAYNKHRDKPIREQAENIIHLFTLTNLGAPAAFKYFDTTIDRKRYTSTKEVLDATLIHQSITGLYETRIDLSQLGGDGGGGSPKKKRKVDPKKKRKVDPKKKRKVGGSGATNFSLLKQAGDVEENPGPMNPAISVALLLSVLQVSRGQKVTSLTACLVNQNLRLDCRHENNTKDNSIQHEFSLTREKRKHVLSGTLGIPEHTYRSRVTLSNQPYIKVLTLANFTTKDEGDYFCELRVSGANPMSSNKSISVYRDKLVKCGGISLLVQNTSWMLLLLLSLSLLQALDFISL

SEQ ID NO: 1175 - DNA, 7140 bp, Synthetic construct
  source 1..7140: mol_type = other DNA
ctgcccacctgcagctgtcttgatcgagttatacaaaaagacaaaggcccatattatacacaccttggggcaggaccaagtgttgctgctgtcagggaaatcatggagaataggtatggtcaaaaaggaaacgcaataaggatagaaatagtagtgtacaccggtaaagaagggaaaagctctcatgggtgtccaattgctaagtgggttttaagaagaagcagtgatgaagaaaaagttctttgtttggtccggcagcgtacaggccaccactgtccaactgctgtgatggtggtgctcatcatggtgtgggatggcatccctcttccaatggccgaccggctatacacagagctcacagagaatctaaagtcatacaatgggcaccctaccgacagaagatgcaccctcaatgaaaatcgtacctgtacatgtcaaggaattgatccagagacttgtggagcttcattctcttttggctgttcatggagtatgtactttaatggctgtaagtttggtagaagcccaagccccagaagatttagaattgatccaagctctcccttacatgaaaaaaaccttgaagataacttacagagtttggctacacgattagctccaatttataagcagtatgctccagtagcttaccaaaatcaggtggaatatgaaaatgttgcccgagaatgtcggcttggcagcaaggaaggtcgacccttctctggggtcactgcttgcctggacttctgtgctcatccccacagggacattcacaacatgaataatggaagcactgtggtttgtaccttaactcgagaagataaccgctctttgggtgttattcctcaagatgagcagctccatgtgctacctctttataagctttcagacacagatgagtttggctccaaggaaggaatggaagccaagatcaaatctggggccatcgaggtcctggcaccccgccgcaaaaaaagaacgtgtttcactcagcctgttccccgttctggaaagaagagggctgcgatgatgacagaggttcttgcacataagataagggcagtggaaaagaaacctattccccgaatcaagcggaagaataactcaacaacaacaaacaacagtaagccttcgtcactgccaaccttagggagtaacactgagaccgtgcaacctgaagtaaaaagtgaaaccgaaccccattttatcttaaaaagttcagacaacactaaaacttattcgctgatgccatccgctcctcacccagtgaaagaggcatctccaggcttctcctggtccccgaagactgcttcagccacaccagctccactgaagaatgacgcaacagcctcatgcgggttttcagaaagaagcagcactccccactgtacgatgccttcgggaagactcagtggtgccaatgctgcagctgctgatggccctggcatttcacagcttggcgaagtggctcctctccccaccctgtctgctcctgtgatggagcccctcattaattctgagccttccactggtgtgactgagccgctaacgcctcatcagccaaaccaccagccctccttcctcacctctcctcaagaccttgcctcttctccaatggaagaagatgagcagcattctgaagcagatgagcctccatcagacgaacccctatctgatgaccccctgtcacctgctgaggagaaattgccccacattgatgagtattggtcagacagtgagcacatctttttggatgcaaatattggtggggtggccatcgcacctgctcacggctcggttttgattgagtgtgcccggcgagagctgcacgctaccactcctgttgagcaccccaaccgtaatcatccaacccgcctctcccttgtcttttaccagcacaaaaacctaaataagccccaacatggttttgaactaaacaagattaagtttgaggctaaagaagctaagaataagaaaatgaaggcctcagagcaaaaagaccaggcagctaatgaaggtccagaacagtcctctgaagtaaatgaattgaaccaaattccttctcataaagcattaacattaacccatgacaatgttgtcaccgtgtccccttatgctctcacacacgttgcggggccctataaccattgggtcggagggccgagctctggcgcacccccaccaagtggagggtctcctgccgggtccccaacatctactgaagaaggcaccagcgaatccgcaacgcccgagtcaggccctggtacctccacagaaccatctgaaggtagtgcgcctggttccccagctggaagccctacttccaccgaagaaggcacgtcaaccgaaccaagtgaaggatctgcccctgggaccagcactgaaccatctgagatggacaagaagtattctatcggactggccatcgggactaatagcgtcgggtgggccgtgatcactgacgagtacaaggtgccctctaagaagttcaaggtgctcgggaacaccgaccggcattccatcaagaaaaatctgatcggagctctcctctttgattcaggggagaccgctgaagcaacccgcctcaagcggactgctagacggcggtacaccaggaggaagaaccggatttgttaccttcaagagatattctccaacgaaatggcaaaggtcgacgacagcttcttccataggctggaagaatcattcctcgtggaagaggataagaagcatgaacggcatcccatcttcggtaatatcgtcgacgaggtggcctatcacgagaaatacccaaccatctaccatcttcgcaaaaagctggtggactcaaccgacaaggcagacctccggcttatctacctggccctggcccacatgatcaagttcagaggccacttcctgatcgagggcgacctcaatcctgacaatagcgatgtggataaactgttcatccagctggtgcagacttacaaccagctctttgaagagaaccccatcaatgcaagcggagtcgatgccaaggccattctgtcagcccggctgtcaaagagccgcagacttgagaatcttatcgctcagctgccgggtgaaaagaaaaatggactgttcgggaacctgattgctctttcacttgggctgactcccaatttcaagtctaatttcgacctggcagaggatgccaagctgcaactgtccaaggacacctatgatgacgatctcgacaacctcctggcccagatcggtgaccaatacgccgaccttttccttgctgctaagaatctttctgacgccatcctgctgtctgacattctccgcgtgaacactgaaatcaccaaggcccctctttcagcttcaatgattaagcggtatgatgagcaccaccaggacctgaccctgcttaaggcactcgtccggcagcagcttccggagaagtacaaggaaatcttctttgaccagtcaaagaatggatacgccggctacatcgacggaggtgcctcccaagaggaattttataagtttatcaaacctatccttgagaagatggacggcaccgaagagctcctcgtgaaactgaatcgggaggatctgctgcggaagcagcgcactttcgacaatgggagcattccccaccagatccatcttggggagcttcacgccatccttcggcgccaagaggacttctacccctttcttaaggacaacagggagaagattgagaaaattctcactttccgcatcccctactacgtgggacccctcgccagaggaaatagccggtttgcttggatgaccagaaagtcagaagaaactatcactccctggaacttcgaagaggtggtggacaagggagccagcgctcagtcattcatcgaacggatgactaacttcgataagaacctccccaatgagaaggtcctgccgaaacattccctgctctacgagtactttaccgtgtacaacgagctgaccaaggtgaaatatgtcaccgaagggatgaggaagcccgcattcctgtcaggcgaacaaaagaaggcaattgtggaccttctgttcaagaccaatagaaaggtgaccgtgaagcagctgaaggaggactatttcaagaaaattgaatgcttcgactctgtggagattagcggggtcgaagatcggttcaacgcaagcctgggtacctaccatgatctgcttaagatcatcaaggacaaggattttctggacaatgaggagaacgaggacatccttgaggacattgtcctgactctcactctgttcgaggaccgggaaatgatcgaggagaggcttaagacctacgcccatctgttcgacgataaagtgatgaagcaacttaaacggagaagatataccggatggggacgccttagccgcaaactcatcaacggaatccgggacaaacagagcggaaagaccattcttgatttccttaaaagcgacggattcgctaatcgcaacttcatgcaacttatccatgatgattccctgacctttaaggaggacatccagaaggcccaagtgtctggacaaggtgactcactgcacgagcatatcgcaaatctggctggttcacccgctattaagaagggtattctccagaccgtgaaagtcgtggacgagctggtcaaggtgatgggtcgccataaaccagagaacattgtcatcgagatggccagggaaaaccagactacccagaagggacagaagaacagcagggagcggatgaaaagaattgaggaagggattaaggagctcgggtcacagatccttaaagagcacccggtggaaaacacccagcttcagaatgagaagctctatctgtactaccttcaaaatggacgcgatatgtatgtggaccaagagcttgatatcaacaggctctcagactacgacgtggacgccatcgtccctcagagcttcctcaaagacgactcaattgacaataaggtgctgactcgctcagacaagaaccggggaaagtcagataacgtgccctcagaggaagtcgtgaaaaagatgaagaactattggcgccagcttctgaacgcaaagctgatcactcagcggaagttcgacaatctcactaaggctgagaggggcggactgagcgaactggacaaagcaggattcattaaacggcaacttgtggagactcggcagattactaaacatgtcgcccaaatccttgactcacgcatgaataccaagtacgacgaaaacgacaaacttatccgcgaggtgaaggtgattaccctgaagtccaagctggtcagcgatttcagaaaggactttcaattctacaaagtgcgggagatcaataactatcatcatgctcatgacgcatatctgaatgccgtggtgggaaccgccctgatcaagaagtacccaaagctggaaagcgagttcgtgtacggagactacaaggtctacgacgtgcgcaagatgattgccaaatctgagcaggagatcggaaaggccaccgcaaagtacttcttctacagcaacatcatgaatttcttcaagaccgaaatcacccttgcaaacggtgagatccggaagaggccgctcatcgagactaatggggagactggcgaaatcgtgtgggacaagggcagagatttcgctaccgtgcgcaaagtgctttctatgcctcaagtgaacatcgtgaagaaaaccgaggtgcaaaccggaggcttttctaaggaatcaatcctccccaagcgcaactccgacaagctcattgcaaggaagaaggattgggaccctaagaagtacggcggattcgattcaccaactgtggcttattctgtcctggtcgtggctaaggtggaaaaaggaaagtctaagaagctcaagagcgtgaaggaactgctgggtatcaccattatggagcgcagctccttcgagaagaacccaattgactttctcgaagccaaaggttacaaggaagtcaagaaggaccttatcatcaagctcccaaagtatagcctgttcgaactggagaatgggcggaagcggatgctcgcctccgctggcgaacttcagaagggtaatgagctggctctcccctccaagtacgtgaatttcctctaccttgcaagccattacgagaagctgaaggggagccccgaggacaacgagcaaaagcaactgtttgtggagcagcataagcattatctggacgagatcattgagcagatttccgagttttctaaacgcgtcattctcgctgatgccaacctcgataaagtccttagcgcatacaataagcacagagacaaaccaattcgggagcaggctgagaatatcatccacctgttcaccctcaccaatcttggtgcccctgccgcattcaagtacttcgacaccaccatcgaccggaaacgctatacctccaccaaagaagtgctggacgccaccctcatccaccagagcatcaccggactttacgaaactcggattgacctctcacagctcggaggggatggtggcggaggctcgccaaaaaagaagagaaaggtagacccaaagaaaaaacgaaaagtagatccgaaaaagaagaggaaggtgggaggtagtggggctactaacttcagcctgctgaagcaggctggagacgtggaggagaaccctggacctatgaacccagccatcagcgtcgctctcctgctctcagtcttgcaggtgtcccgagggcagaaggtgaccagcctgacagcctgcctggtgaaccaaaaccttcgcctggactgccgccatgagaataacaccaaggataactccatccagcatgagttcagcctgacccgagagaagaggaagcacgtgctctcaggcacccttgggatacccgagcacacgtaccgctcccgcgtcaccctctccaaccagccctatatcaaggtccttaccctagccaacttcaccaccaaggatgagggcgactacttttgtgagcttcgcgtttcgggcgcgaatcccatgagctccaataaaagtatcagtgtgtatagagacaagctggtcaagtgtggcggcataagcctgctggttcagaacacatcctggatgctgctgctgctgctttccctctccctcctccaagccctggacttcatttctctgtga

SEQ ID NO: 1176 - protein, 65 aa, Synthetic construct
RTLVTFKDVFVDFTREEWKLLDTAQQILYRNVMLENYKNLVSLGYQLTKPDVILRLEKGEEPWLV

SEQ ID NO: 1177 - DNA, 195 bp, Synthetic construct
  source 1..195: mol_type = other DNA
cggacactggtgaccttcaaggatgtgtttgtggacttcaccagggaggagtggaagctgctggacactgctcagcagatcctgtacagaaatgtgatgctggagaactataagaacctggtttccttgggttatcagcttactaagccagatgtgatcctccggttggagaagggagaagagccctggctggtg
